United States Patent Application Publication US 2011/0252509 A1 - sequence listing, part 3

SEQ ID NO: 6057 - DNA, 1268 bp, Glycine max
  CDS (9)..(1118)
gcacgagcatgagttctctgaatcttggaacatggcctcgtcccacctctatgttgaacacaccttcacatctccttcccccttttcacactctcactctcacaacaacgcttcccaaactcgcaagtggaaccccaaaactaatatcttcttttcccctcgtctctgctgtgcccactaaggaacacacagtcacaacccaggaaattcaactccaagacacgccgctcaacttcgatttcaagggctacatgatcgccaaggcccacacggtaaaccaagccttggacgccgccattgcgttgagggacccacacaagatccaccaagccatgcgctactccctcctcgccggcggcaagagggtccgccccgtgctctgcatcgccgcatgcgagctcgtcggtggcacagaggccaccgccatccccgccgcctgcgccgtcgagatgatccacaccatgtcgctcatccacgacgacctgccatgtatggacaacgacgacctccgccgcggaaagccgaccaaccacaaggtctacggcgaggacgtggcggtcctcgccggcgacgcgctcctcgccttcgcgttcgagcacgtggcagcgtccacggagggagtgtcgccgtcacgcgtggttcgagcgattggggaattagcgaagtcgatcggtacggaagggcttgtggcgggacaagtggtggatatagattcggagggggtggcgaatgtggggctggagacgctggaattcattcacgtgcacaaaacggcggcgttgctggaagctgcggttgtgttgggggcaatagtgggaggtgggagcgacgaggaggttgagaaattaaggaagttcgctaggtgcattgggttgttgtttcaggttgtggacgacattctggatgttacgaagtcgtcggaggaattggggaagacggcggggaaggatttggtggctgataaggttacttatcccaagctattggggatagataagtcaaaggaatttgctcaagaattgttaaaggatgccaaggaacaattgtctggcttcgatcctccaaaggcggctcccttgtttgcattaaccaattacattgcttataggcaaaattaaaagtgaaaacattggataccctgttttctcaccggggaaccactcaaataaatttctctgcttccatttccagtcctcaatgctgtactgttctccagcgattatttgtaataaaataaacctctttttttcaaaaaaaaaaaaaaaaaa

SEQ ID NO: 6058 - protein, 369 aa, Glycine max
MSSLNLGTWPRPTSMLNTPSHLLPPFHTLTLTTTLPKLASGTPKLISSFPLVSAVPTKEHTVTTQEIQLQDTPLNFDFKGYMIAKAHTVNQALDAAIALRDPHKIHQAMRYSLLAGGKRVRPVLCIAACELVGGTEATAIPAACAVEMIHTMSLIHDDLPCMDNDDLRRGKPTNHKVYGEDVAVLAGDALLAFAFEHVAASTEGVSPSRVVRAIGELAKSIGTEGLVAGQVVDIDSEGVANVGLETLEFIHVHKTAALLEAAVVLGAIVGGGSDEEVEKLRKFARCIGLLFQVVDDILDVTKSSEELGKTAGKDLVADKVTYPKLLGIDKSKEFAQELLKDAKEQLSGFDPPKAAPLFALTNYIAYRQN

SEQ ID NO: 6059 - DNA, 1441 bp, Glycine max
  CDS (150)..(1202)
gcacgaggttagtgagtgagtccacccaaatgctggtaattcttggactcattggtggaagtgtgtccatgaagaacgtagtagccagtaacaccgtaatgtctcatctctctcactcgtgacactttcttaatccctaacccattgtcatgagtgccctcaatttgaacgcatggccacgccccagatccagatccagatcccgatccccaacctttcacgccgtcaataagttacccttcttcaccgttaccaaacggagagcattctcgctctctgcggtgctcacggtcgagacggaagagaagccaccaatcttcgacttcaagaactacatgctttccaaagcgtccgcggtcaacaagggcctcgacgactccgtttcgctccgcgagcccaagaagatccacgaggcgatgcggtactcgctcctcgccggcggcaagcgcgtgcgccctgtgttatgcgtggcggcgtgcgagctcgtcggcgggcacgaggccacggcgatgcccgccgcctgcgccctcgagatgatccacaccatgtcgctcatccacgacgacctcccctgcatggacaacgacgatctccgccgcggcaagcccaccaaccacacggtcttcggcgaggacgtcgccgtcctcgccggcgacgccctcctggccttcgccttcgagcacatcgccgcctccacccggggggcctcggcgccccggatcctccgcgcgatcggcgagctcgcgcggtcgatcggctccgagggcctcgttgccggccaggtcgtcgacatcaactctgagggcctggccgacgttggcctagagcgcctggagttcatccacgtccacaagaccgccgcgctcctcgagggtgcggttgtcctcggcgccatcctcggcggcggcaccgacgacgaggtcgaaaaattgagaaaattcgctcgctacattggtctactctttcaggttgttgatgacattctcgatgttactaagtcttcccaggaattgggaaagaccgctggaaaagaccttgtggctgataaggttacttaccccaagcttttggggattgagaagtctaaggagtttgctgcgaaactgaacaaggatgctcaggatcagcttgctggctttgaccctgttaaggctgctcctttgattgctttagccaattacattgcttataggcagaactagattattgttcttgtctctactttacaaacaaatcattgtttgttttaggaatatttagttttttatgaaatgaaaatcattggatttacatttatttacatattgcaatgcaactagggattattaaataggagcctcccctgcccttcttctatgtgcctgccatagtcgtcaattttgtatgatgaataactataaatattagaatacctttaatttgtaaaaaaaaaaaaaaaaaa

SEQ ID NO: 6060 - protein, 350 aa, Glycine max
MSALNLNAWPRPRSRSRSRSPTFHAVNKLPFFTVTKRRAFSLSAVLTVETEEKPPIFDFKNYMLSKASAVNKGLDDSVSLREPKKIHEAMRYSLLAGGKRVRPVLCVAACELVGGHEATAMPAACALEMIHTMSLIHDDLPCMDNDDLRRGKPTNHTVFGEDVAVLAGDALLAFAFEHIAASTRGASAPRILRAIGELARSIGSEGLVAGQVVDINSEGLADVGLERLEFIHVHKTAALLEGAVVLGAILGGGTDDEVEKLRKFARYIGLLFQVVDDILDVTKSSQELGKTAGKDLVADKVTYPKLLGIEKSKEFAAKLNKDAQDQLAGFDPVKAAPLIALANYIAYRQN

SEQ ID NO: 6061 - DNA, 1161 bp, Glycine max
  CDS (133)..(1161)
gcacgagccataaccttatctatcgcaaccacctcccaaatcactctcatccaacttcatctctctcttcccccagttgccagatctgaatcacaccttcactcttgcgatttaattactgagtagttgaggatggctccttttgcttttgcaacattgccctcttctcacatctgccgcctcccaaagcccacaaacttgaagtttcgagttcgctgctctactgccgcgtcttctccttcttcggtttccactagatcaaaagctgctggctttgatttgaagacatactgggccaacctaatggtgcagatcaatcagaagctggacgaagctatcccggttcagtttcctccgcagatatatgaagctatgaggtattcagtccttgccaaaggtgccaagcgagccccacctgttatgtgcatctctgcctgtgaactctttggtggcagccgccttgccgcctttcccactgcctgtgcccttgaaatggttcatgcagcttcattgatacacgatgatcttccctgcatggatgactccccctcacgccgtggtcagccttcaaaccataccatctatggtgttgacatggcaattcttgcgggcgatgcactctttccccttggatttcgacacattgtttcacaaactccatcagaccttgtgcctgagtcgcacctccttcgtgtgattgccgagatagcccgctctgtaggatccactggaatggctgcagggcagttcctggaccttgaaggaggacccaatgcagttggatttatacaagaaaaaaagtttggtgaaatgggggagtcttctgcagtgtgtggaggattcttggctggagctgaagatgatgagatagagagactgaggaggtatgggagagctgttggggtattgtatgcagttgtggatgatattatagaagagagattgaaagttgagggagatggtgacaggaaaaacaagggtaagagttatgcagaggtttatggagttgaaaaggcaatagaaaaagctgaagagctcagagcaaaggctaaagaagaattggatggatttgagaagcatggggaacgggtctttcctctctacagttttgtggattatgcttttgatagaagtttcagtgttgatgatgccagtggataa

SEQ ID NO: 6062 - protein, 342 aa, Glycine max
MAPFAFATLPSSHICRLPKPTNLKFRVRCSTAASSPSSVSTRSKAAGFDLKTYWANLMVQINQKLDEAIPVQFPPQIYEAMRYSVLAKGAKRAPPVMCISACELFGGSRLAAFPTACALEMVHAASLIHDDLPCMDDSPSRRGQPSNHTIYGVDMAILAGDALFPLGFRHIVSQTPSDLVPESHLLRVIAEIARSVGSTGMAAGQFLDLEGGPNAVGFIQEKKFGEMGESSAVCGGFLAGAEDDEIERLRRYGRAVGVLYAVVDDIIEERLKVEGDGDRKNKGKSYAEVYGVEKAIEKAEELRAKAKEELDGFEKHGERVFPLYSFVDYAFDRSFSVDDASG

SEQ ID NO: 6063 - DNA, 891 bp, Abies grandis
  CDS (1)..(891)
atgtttgatttcaacaagtacatggattccaaggcaatgacagtgaatgaggcgttgaataaggctatcccacttcgttatccccagaaaatatatgaatccatgaggtattctcttctggcaggagggaaacgagttcgtcctgttctgtgcattgcagcatgtgagcttgttggaggaaccgaggagcttgcgattccaactgcctgtgcaatcgaaatgatccacacaatgtctttgatgcatgatgacttgccttgcatagacaatgatgatttacggcgagggaaacctacaaaccataagatcttcggggaagatactgctgttactgcagggaatgcgcttcattcttacgcctttgagcatattgcagtttccacaagcaaaactgtgggggctgataggattttgaggatggtatctgaactgggtagagcaacaggctctgaaggggttatgggtggccagatggtcgatattgccagcgaaggggatccttctattgaccttcagactctggaatggattcatattcacaagactgcaatgctcttggagtgctcggttgtgtgtggggcgatcatcggtggtgcttcggagattgtgatcgagagagctcgaaggtatgcccgttgcgtggggcttctttttcaggttgtggatgacatactcgatgtcacgaaatcatcagacgaactgggcaagactgcaggaaaggatttgattagtgataaggcaacttatccaaagctcatgggtttggagaaagcaaaggagttttctgatgaattgttgaacagagctaagggagagttatcttgcttcgatccagtgaaggcagcacctctgttgggtcttgcagattacgtggcattcagacaaaattga

SEQ ID NO: 6064 - protein, 296 aa, Abies grandis
MFDFNKYMDSKAMTVNEALNKAIPLRYPQKIYESMRYSLLAGGKRVRPVLCIAACELVGGTEELAIPTACAIEMIHTMSLMHDDLPCIDNDDLRRGKPTNHKIFGEDTAVTAGNALHSYAFEHIAVSTSKTVGADRILRMVSELGRATGSEGVMGGQMVDIASEGDPSIDLQTLEWIHIHKTAMLLECSVVCGAIIGGASEIVIERARRYARCVGLLFQVVDDILDVTKSSDELGKTAGKDLISDKATYPKLMGLEKAKEFSDELLNRAKGELSCFDPVKAAPLLGLADYVAFRQN

SEQ ID NO: 6065 - DNA, 915 bp, Abies grandis
  CDS (1)..(915)
atgtttgatttcaacaagtacatggattccaaggcaatgacagtgaatgaggcgttgaataaggctatcccacttcgttatccccagaaaatatatgaatccatgaggtattctcttctggcaggagggaaacgagttcgtcctgttctgtgcattgcagcatgtgagcttgttggaggaaccgaggagcttgcgattccaactgcctgtgcaatcgaaatgatccacacaatgtctttgatgcatgatgacttgccttgcatagacaatgatgatttacggcgagggaaacctacaaaccataagatcttcggggaagatactgctgttactgcagggaatgcgcttcattcttacgcctttgagcatattgcagtttccacaagcaaaactgtgggggctgataggattttgaggatggtatctgaactgggtagagcaacaggctctgaaggggttatgggtggccagatggtcgatattgccagcgaaggggatccttctattgaccttcagactctggaatggattcatattcacaagactgcaatgctcttggagtgctcggttgtgtgtggggcgatcatcggtggtgcttcggagattgtgatcgagagagctcgaaggtatgcccgttgcgtggggcttctttttcaggttgtggatgacatactcgatgtcacgaaatcatcagacgaactgggcaagactgcaggaaaggatttgattagtgataaggcaacttatccaaagctcatgggtttggagaaagcaaaggagttttctgatgaattgttgaacagagctaagggagagttatcttgcttcgatccagtgaaggcagcacctctgttgggtcttgcagattacgtggcattcagacaaaatctcgagcaccaccaccaccaccactga

SEQ ID NO: 6066 - protein, 304 aa, Abies grandis
MFDFNKYMDSKAMTVNEALNKAIPLRYPQKIYESMRYSLLAGGKRVRPVLCIAACELVGGTEELAIPTACAIEMIHTMSLMHDDLPCIDNDDLRRGKPTNHKIFGEDTAVTAGNALHSYAFEHIAVSTSKTVGADRILRMVSELGRATGSEGVMGGQMVDIASEGDPSIDLQTLEWIHIHKTAMLLECSVVCGAIIGGASEIVIERARRYARCVGLLFQVVDDILDVTKSSDELGKTAGKDLISDKATYPKLMGLEKAKEFSDELLNRAKGELSCFDPVKAAPLLGLADYVAFRQNLEHHHHHH

SEQ ID NO: 6067 - DNA, 915 bp, Abies grandis
  CDS (1)..(915)
atgtttgatttcaaggagtacttgcattccaaagcaatatcagtgaatgaggcactggagagggctgtcccacttcgctatcctgaaaaaatacatgaagctatgaggtattctcttctagcaggagggaagcggattcgtcctattctgactattgcagcatgtgagcttgtgggagggagtgaggagctcgccatgccaactgcctgtgcaatggagatgatccacacaatgtctttgattcatgatgatttgccttccatggacaatgatgatttacgccgaggtaagcttacaaaccacaaggtctttggcgaaggcactgctgttcttgcaggggatgcacttctttcatttgcatttgagcacattgcagtgtccacaaggaaaactgtggcgagtcatagggttttgagggtggtatctgaattgggtaaggcaataggctctcaaggggttgctggtgggcaggttgctgatattaccagtgaaggggatccatctgttgggcttgagactctcgaatggattcacattcacaagactgcagtgctcttggagtgcgccgttgtgagtggggcgatcatcggtggcgcttcagagaatgaaattgagagaactggaaggtatgcccgttgcgttgggcttctgtttcaggttgtggatgacatactcgatgtcaccagatcatcagaagaattgggaaagactgcaggaaaggatttggttagtgataaggccacttatcccaagctgatgggtttggagaaagcgaaggaatttgctgatgaattgttggacagagctaaggaggagttatcttgcttcaacccagctaaggctgcacctctgttgggtcttgcagattacattgcattaagacagaacctcgagcaccaccaccaccaccactga

SEQ ID NO: 6068 - protein, 304 aa, Abies grandis
MFDFKEYLHSKAISVNEALERAVPLRYPEKIHEAMRYSLLAGGKRIRPILTIAACELVGGSEELAMPTACAMEMIHTMSLIHDDLPSMDNDDLRRGKLTNHKVFGEGTAVLAGDALLSFAFEHIAVSTRKTVASHRVLRVVSELGKAIGSQGVAGGQVADITSEGDPSVGLETLEWIHIHKTAVLLECAVVSGAIIGGASENEIERTGRYARCVGLLFQVVDDILDVTRSSEELGKTAGKDLVSDKATYPKLMGLEKAKEFADELLDRAKEELSCFNPAKAAPLLGLADYIALRQNLEHHHHHH

SEQ ID NO: 6069 - DNA, 915 bp, Abies grandis
  CDS (1)..(915)
atgtttgacttcaaggagtatctacgttccaaggcaatggcagtgaatgaggcactggatagggctgtaccacttcgttatcctgaaagaatacatgaagctatgaggtattctcttctagcaggagggaagagggttcgtcctgttctgtgcatttcagcatgtgagcttgtgggagggaccgaggaagtcgccatgccaactgcctgtgcaatggagatgatccacacaatgtctttaattcatgatgacttgccttgcatggacaatgatgattttcgcagaggtaagcctacaaaccacaaggtcttcggggaaggcactgctattcttgcaggggatgcactgctttcatttgcatttgaacacattgcagtatccacaagcaaatctgtggggactgataggattttgagggtggtatctgaattgggtagaacaataggctcccaagggcttgtgggtgggcaggttgctgatattacgagtgagggcgatgcttctgttgaccttgacactctggaatggattcacattcataagactgcagtgctattggagtgctcagttatgtgtggggcgatcattagtggtgcttcagacaatgagattgagagaattcaaagatatgcccgtagcgtggggcttctgtttcaggttgttgacgacatactcgacgtcacgaaatcatcaaaagagttgggcaaaactgcaggaaaggatttgatcagtgataaggccacttatccgaagctgatgggtttagagaaagcaaaacaatttgcttcggatttgttgatcagagctaaggaggatttatcttgcttcgacccaatgaaggctgcaccattgttgggtcttgcagattacattgcattcagacaaaacctcgagcaccaccaccaccaccactga

SEQ ID NO: 6070 - protein, 304 aa, Abies grandis
MFDFKEYLRSKAMAVNEALDRAVPLRYPERIHEAMRYSLLAGGKRVRPVLCISACELVGGTEEVAMPTACAMEMIHTMSLIHDDLPCMDNDDFRRGKPTNHKVFGEGTAILAGDALLSFAFEHIAVSTSKSVGTDRILRVVSELGRTIGSQGLVGGQVADITSEGDASVDLDTLEWIHIHKTAVLLECSVMCGAIISGASDNEIERIQRYARSVGLLFQVVDDILDVTKSSKELGKTAGKDLISDKATYPKLMGLEKAKQFASDLLIRAKEDLSCFDPMKAAPLLGLADYIAFRQNLEHHHHHH

SEQ ID NO: 6071 - DNA, 1470 bp, Glycine max
  CDS (238)..(1341)
gcacgaggcgttgtgttgtgtcctgtgctagttgaatctcatctaaccccaaatactaagatcctatcctactactcatttgcttatccatcatcaacaactctcatttctcatcatcacttcccacttacgctcggtaatgtctcatttctcacgcatcaacccctaataataatcccccaaacagaacctttcccacccaatccaaacacagccctaaacccccccaccatcatcatgagtgccgtgaatttgaacacatggccacgccccagcttcattttgaaccaaaccgccacaagaagatccagatcctccccaacctctcatttctttcacggcgtcaataagttaccgtcacccatttcctccctcaccgttgccaaacgctcatttacgctctcggcggtgctgacgaaagaggacaccgtggagacggaagagaagccaccgattttcgacttcaagaactacatggtttccaaagcgagcgcggtgaacaaggccctcgacgacgccgtttcgctccgcgagccgcagaagatccacgaggcgatgcggtactcgctcctcgccggcggcaagcgcgtgaggccggttttgtgcgtggcggcctgcgagctcgtcggcggcgaggaggccacggcgatgcccgccgcctgcgccatcgagatgatccacaccatgtcgctcatccacgatgacctcccctgcatggacaacgacgacctccgccgcggtaagcccaccaaccacaaggtcttcggcgaggacgtcgccgtcctcgccggcgacgcgctcctcgccttcgccttcgagcacatcgccgcctccacccggggcgcctccccggggcggatcgtccgcgcgatcggcgagcttgcgcggtcgatcggctccgagggacttgtcgccggccaggtcgtcgacatcaactccgagggcctggccgacgtggacctcgagcgcctcgagttcatccacgtccacaagactgccgcgctcctcgagggtgcggtggtgctcggcgccatcctcggcggcggcaccgacgacgaggtcgagaaattgagaaaattcgctcgctacattggtctgctctttcaggttgttgatgacattctcgatgttaccaagtcatctcaggaattggggaaaaccgcaggaaaagaccttgtggcagataaggttacttaccccaaacttttgggtattgagaaatctaaggtgtttgctgcgaagttgaacaaagatgctcaggatcagcttgttgggtttgaccctgttaaggctgctcctttgattgctttagccaattacattgcttataggcagaactagattgtttgtttaggaaagtttagatttatgaaatcatattggattaacatttacttattggctattgcaatgcaactagggattataaaataataatacccccttgcccttaaaaaaaaaaaaaaaaaa

SEQ ID NO: 6072 - protein, 367 aa, Glycine max
MSAVNLNTWPRPSFILNQTATRRSRSSPTSHFFHGVNKLPSPISSLTVAKRSFTLSAVLTKEDTVETEEKPPIFDFKNYMVSKASAVNKALDDAVSLREPQKIHEAMRYSLLAGGKRVRPVLCVAACELVGGEEATAMPAACAIEMIHTMSLIHDDLPCMDNDDLRRGKPTNHKVFGEDVAVLAGDALLAFAFEHIAASTRGASPGRIVRAIGELARSIGSEGLVAGQVVDINSEGLADVDLERLEFIHVHKTAALLEGAVVLGAILGGGTDDEVEKLRKFARYIGLLFQVVDDILDVTKSSQELGKTAGKDLVADKVTYPKLLGIEKSKVFAAKLNKDAQDQLVGFDPVKAAPLIALANYIAYRQN

SEQ ID NO: 6073 - DNA, 1101 bp, Oryza sativa (japonica cultivar-group)
  CDS (1)..(1101)
atggctgccttccccccgctcgccgcctcccgcgtccgcatctcccctctcatccccgccgccgcgatggctgggacagcaggggcggcggcggcgtcgtacgcgcagcaccggcggaggttctgcgccatcgtggcgaccgcggcggcgtcaccggtgccggccgcggcggcggcggcggcgacggggtttgattttaacgcgtatatgggtgagaaggctgcggcggtgaaccgggcgctggacgcgtcgatcccggcggacgagccgcccgcggcgctccacgaggcgatgcggtacgcgctgctggcgggcgggaagcgggtgcggcccgcgctgtgcctggcggcgtgcgcggtggtcggggggcgggaggcctgggcgatgcccgccgccgccgccgtcgagatggtgcacaccatgtcgctcgtccacgacgacctcccctgcatggacgacgacgacctccgccgcgggaagcccacctgccacgtcgtctacggggagcccatcgccgtgctcaccggcgacgcgctgctctccctctccttccaccacatggccaggttcgactcctaccctccggacatcgacgctgacaagcaccccgcccgcgtcgtccgcgccattggcgagctcgcgcgctgcataggctccgagggcctagtcgccggccaggttgttgatcttgagatgactggatcgaccgaaactgtacctcttgaacgtcttgagtacatccatctccacaaaactgctgcattgcttgaggcatcagtggttattggggcaatcttgggaggtggctctgatgagcagattgaaagtttgcgcatgtatgcgagatcgataggattgttgttccaggttgttgatgatatacttgatgtgaccaagtcttctgaggagctcggcaagacagcagggaaggacttggcgagtgacaagacgacatacccgaaattacttgggctggagaaatcacgggagtttgcagaaaagttgctttctgatgcaagggaacaactttcaggatttgatcaagagaccgcagcaccacttctgcacctggccaattatattgcctatcggcagaactga

SEQ ID NO: 6074 - protein, 366 aa, Oryza sativa (japonica cultivar-group)
MAAFPPLAASRVRISPLIPAAAMAGTAGAAAASYAQHRRRFCAIVATAAASPVPAAAAAAATGFDFNAYMGEKAAAVNRALDASIPADEPPAALHEAMRYALLAGGKRVRPALCLAACAVVGGREAWAMPAAAAVEMVHTMSLVHDDLPCMDDDDLRRGKPTCHVVYGEPIAVLTGDALLSLSFHHMARFDSYPPDIDADKHPARVVRAIGELARCIGSEGLVAGQVVDLEMTGSTETVPLERLEYIHLHKTAALLEASVVIGAILGGGSDEQIESLRMYARSIGLLFQVVDDILDVTKSSEELGKTAGKDLASDKTTYPKLLGLEKSREFAEKLLSDAREQLSGFDQETAAPLLHLANYIAYRQN

SEQ ID NO: 6075 - DNA, 918 bp, Mesorhizobium loti MAFF303099
  CDS (1)..(918): transl_table=11
atgacgaatgacgacgaaatggcgttcgaaatggcgctcatcaggcgggcagccgccgtcgaggtgctgctgcggcgcttgctcgacgatcgcccgctttcgggagagatcgcgcggcccgaccgcctgatggcggcgatgcgccatggcgtgctgaacggcggcaagcgcctgcgccccttcctggtcatggaaagtgccgcccttttctccgccgatggcgaagcagcactgcgcgtcgcggcggcactcgaatgcgtgcattgctattcactgatccatgacgacctgccggcgatggacgatgatgatctgcgccgcggccagccgaccgtgcacaaggccttcgacgaggcaaccgcgatcctggccggcgacgccttgctgacgctggccttcgacatcgtcgccagcgaggcgaccgtcctgccggcggatcggcgagcggccttggtgctggcgcttgcccgtgcggccggagccggcggcatggtcggtggccagaagctcgacctcgaagccgagcagacaccgcccgacgaagcgggcatcataacgctgcaggcgatgaagaccggcgccctgatccgcttcgcctgcgaggccggcgccatcatcgccggcgctccggccgaggaccgcgaaaggctggccgagttcggctcggccatcggccttgccttccagcttgccgacgacctgctcgatttgaccgccgacgccggccagatgggcaaggcgaccggcaaggacgccgccgccggcaagggaacgctggtggcgttgcatggcgcgaattgggcgcacagccagttgcacggccttgtcgggcaggcccacgcgctgctcgacccctatggcgaccgggcggcgctgctgaaggaggctgcgaccttcgtcgcgacgcgcaacagttga

SEQ ID NO: 6076 - protein, 305 aa, Mesorhizobium loti MAFF303099
MTNDDEMAFEMALIRRAAAVEVLLRRLLDDRPLSGEIARPDRLMAAMRHGVLNGGKRLRPFLVMESAALFSADGEAALRVAAALECVHCYSLIHDDLPAMDDDDLRRGQPTVHKAFDEATAILAGDALLTLAFDIVASEATVLPADRRAALVLALARAAGAGGMVGGQKLDLEAEQTPPDEAGIITLQAMKTGALIRFACEAGAIIAGAPAEDRERLAEFGSAIGLAFQLADDLLDLTADAGQMGKATGKDAAAGKGTLVALHGANWAHSQLHGLVGQAHALLDPYGDRAALLKEAATFVATRNS

SEQ ID NO: 6077 - DNA, 1254 bp, Arabidopsis thaliana
  CDS (1)..(1254)
atgatgatgtcatgtcggaatatagacttgggtacgagtgttcttgatcattcttgtagctcttcttcaacaagtcgtcgattcttgtttggcaattcttcgaagaccgtttgtatgattggtggcagaagctgtgttggaaatttggtatttctccggcgagatttggctacttgcagagctgttccggctaaatccaaggagaattctctggtcaacggtattggtcaagatcaaacagtgatgctcaatctgaggcaagagtcacgaaagccaatatctttggaaactctgtttgaggtcgtagctgatgatttgcagaggttgaacgacaatcttttatcgattgttggtgcagaaaatccggttttgatatctgctgctgagcaaatcttcagcgctggtggcaagaggatgagaccgggtttggtattccttgtatcacgagccactgcggaattagcaggcttaaaggaacttacagtagaacatcggcgtttaggtgagatcattgagatgattcacaccgcaagtttgatacacgatgatgtgttagacgaaagtgatatgcgaagaggaagggaaacggttcacgagctattcggaacaagagtagctgtattagctggggatttcatgtttgctcaagcatcatggtacttagcaaatctcgaaaaccttgaagtcattaagctcataagtcaggtgatcaaagattttgcaagcggtgagataaagcaagcatcgagtttattcgattgtgatgtcaagcttgatgactacatgctaaagagttactacaagacagcttcattagtagctgcaagcaccaaaggagcagcaattttcagtaaagtcgaaagcaaggtcgcagagcaaatgtatcagttcgggaagaatctcggtttatcttttcaagtagttgatgacattctggacttcactcagtccacagagcagttaggtaagcctgcagctaatgacctagccaaaggtaacataacggcgccagtgatcttcgcgctagagaatgagccaaggctaagagagatcattgagtctgagttttgtgagcctggatcgcttgaagaagcgattgaaatagttagaaatcgcggtgggatcaagaaagctcaagaattagcaaaggagaaagctgaacttgcgttaaagaatttgaattgtcttcctaggagtggtttcagatcggctcttgaggatatggtaatgtttaatcttgaaaggattgattag

SEQ ID NO: 6078 - protein, 417 aa, Arabidopsis thaliana
MMMSCRNIDLGTSVLDHSCSSSSTSRRFLFGNSSKTVCMIGGRSCVGNLVFLRRDLATCRAVPAKSKENSLVNGIGQDQTVMLNLRQESRKPISLETLFEVVADDLQRLNDNLLSIVGAENPVLISAAEQIFSAGGKRMRPGLVFLVSRATAELAGLKELTVEHRRLGEIIEMIHTASLIHDDVLDESDMRRGRETVHELFGTRVAVLAGDFMFAQASWYLANLENLEVIKLISQVIKDFASGEIKQASSLFDCDVKLDDYMLKSYYKTASLVAASTKGAAIFSKVESKVAEQMYQFGKNLGLSFQVVDDILDFTQSTEQLGKPAANDLAKGNITAPVIFALENEPRLREIIESEFCEPGSLEEAIEIVRNRGGIKKAQELAKEKAELALKNLNCLPRSGFRSALEDMVMFNLERID

SEQ ID NO: 6079 - DNA, 1044 bp, Arabidopsis thaliana
  CDS (1)..(1044)
atgactacactcaatctatcaatttttccatcagttaaaatatccagctccgcatccatacccggattcatcaaaatccaacctttccttctccgtcggaagctctctaccgttttatcggtcaccgccagagacgaaggtatcatccacaaccatttcgatttcacgtcatacatgatcggaaaagctaatgccgtcaatgaagctctcgactccgccgtctcgctccgagaaccaatcaagatccatgaagcgatacgttactcgcttctcgccagaggcaaacgagtgagacccgtgctctgtatcgcagcgtgtgagttagtgggcggcgaagaatccgtggcgttaccggcggcgtgcgccgtggaaatgatccacacaatgtcgttgatccacgacgatcttccatgtatggataacgacgatctccgccgcggaaaaccaacgaaccacaaagttttcggtgaagacgtcgcggttttagccggagacgcgcttatatcgttcgcgtttgagcacttagcaacgtcaacggctgtttctccggctagagttgttcgagcaatcggagagttagcgaaagccattggatcaaaagggctcgtggcgggtcaagtagtggatctaaccagtggaggaatggaccaaaacgacgtcggcttagaggttcttgagtttatccacgttcataaaaccgccgtgttgttagaggcggctacggtgttaggagccatcgttggtggtggttctgatgaagaagttgagaagctgagaagattcgcgagatgcattggattgttgtttcaggtggtggacgatattttggacgtgacgaagtcgtcggaggaattgggaaagaccgccggaaaagatctgattgccgataagctgacgtatccgaaactaatgggtcttgagaaatctaaagactttgcagataagttgttgagcgatgctcacgaacagcttcatgggtttgattcgagtagagttaaacctttactagctttggctaattacattgccaaaagacagaattag

SEQ ID NO: 6080 - protein, 347 aa, Arabidopsis thaliana
MTTLNLSIFPSVKISSSASIPGFIKIQPFLLRRKLSTVLSVTARDEGIIHNHFDFTSYMIGKANAVNEALDSAVSLREPIKIHEAIRYSLLARGKRVRPVLCIAACELVGGEESVALPAACAVEMIHTMSLIHDDLPCMDNDDLRRGKPTNHKVFGEDVAVLAGDALISFAFEHLATSTAVSPARVVRAIGELAKAIGSKGLVAGQVVDLTSGGMDQNDVGLEVLEFIHVHKTAVLLEAATVLGAIVGGGSDEEVEKLRRFARCIGLLFQVVDDILDVTKSSEELGKTAGKDLIADKLTYPKLMGLEKSKDFADKLLSDAHEQLHGFDSSRVKPLLALANYIAKRQN

SEQ ID NO: 6081 - DNA, 855 bp, Arabidopsis thaliana
  CDS (1)..(855)
atgcggctctcgacgtttcgatctgtaccgctccgagaacccctcacggtccaggaagccgtgcggtactcattgctagcgggcggaaaacgtgtgaggcctctgctctgcattgctgtctgcgagcttgtgggaggcgacgaggctactgccatgtcagctgcttgcgcggtcgagatgatccacacaagctctctcattcatgacgatcttccgtgcatggacaatgccgacctccgtagaggcaagcccaccaatcacaaggtatttggagaagacatggcggttttggccggtgatgcgcttcttgctttggcgtttgagcacatgacggttgtgtcgagtgggttggtcgcttccgagaggatgatccgggcagtggttgagctggcaagggccatagggacaaaagggttagtggcagggcaagtggttgacctaagcagcgaaagattgaatccacacgacgttggattggagcgtctagagttcatccacctccacaaaacggcggcgttgttggaggcagcagcggttataggtgccataatgggaggtggaacagaggaagagatcgaaaagcttagaaagtatgctaggtgtattggactattgtttcaggttgttgatgatattcttgacgtaacaaaatctacagaggaattgggaaagactgcaggaaaagacgtaatggctggaaagctgacgtatccaaggctgataggtttggagagatccagggaagttgcggagaaactgagcagagaagccgaggagcagcttctagggtttgagtctgacaaggcggcgcctctggtagctcttgctagctacatttcttgcagaaacgactga

SEQ ID NO: 6082 - protein, 284 aa, Arabidopsis thaliana
MRLSTFRSVPLREPLTVQEAVRYSLLAGGKRVRPLLCIAVCELVGGDEATAMSAACAVEMIHTSSLIHDDLPCMDNADLRRGKPTNHKVFGEDMAVLAGDALLALAFEHMTVVSSGLVASERMIRAVVELARAIGTKGLVAGQVVDLSSERLNPHDVGLERLEFIHLHKTAALLEAAAVIGAIMGGGTEEEIEKLRKYARCIGLLFQVVDDILDVTKSTEELGKTAGKDVMAGKLTYPRLIGLERSREVAEKLSREAEEQLLGFESDKAAPLVALASYISCRND

SEQ ID NO: 6083 - DNA, 1083 bp, Arabidopsis thaliana
  CDS (1)..(1083)
atggctactactgttcatctcagctcatcctccctcttcagccaatccagaggaagaagagacaactccatatcttccgtcaagagtctccgaaaacgcaccgttttatctctctcttctgccctcacctcacaagacgcagggcacatgattcaaccagagggaaaaagcaacgataacaactctgcttttgatttcaagttgtatatgatccgcaaagccgagtctgtaaatgcggctctcgacgtttccgtaccgcttctgaaaccccttactatccaagaagcggtcaggtactctttgctagcgggcggaaaacgtgtgaggcctctgctctgcattgccgcttgtgagcttgtggggggcgacgaggctactgccatgtcagccgcttgcgcggtcgagatgatccacacaagctctctcattcatgacgatcttccgtgcatggacaatgccgacctccgtagaggcaagcccaccaatcacaaggtatatggagaagacatggcggttttggcgggtgatgcactccttgcattggcgtttgagcacatgacggttgtgtcgagtgggttggtcgctcccgagaagatgattcgcgccgtggttgagctggccagggccatagggactacagggctagttgctggacaaatgatagacctagccagcgaaagattgaatccagacaaggttggattggagcatctagagttcatccatctccacaaaacggcggcattgttggaggcagcggcagttttaggggttataatgggaggtggaacagagcaagaaatcgaaaagcttagaaagtatgctaggtgtattggactactgtttcaggttgttgatgacattctcgacgtaacaaaatctactgaggaattgggtaagacagccggaaaagacgtaatggccggaaagctgacgtatccaaggctgataggtttggagggatccagggaagttgcagagaaactgaggagagaagcagaggaacagcttctagggtttgatccaagtaaggcggcgcctttggtggctcttgccagctacattgcttgcagacacaactga

SEQ ID NO: 6084 - protein, 360 aa, Arabidopsis thaliana
MATTVHLSSSSLFSQSRGRRDNSISSVKSLRKRTVLSLSSALTSQDAGHMIQPEGKSNDNNSAFDFKLYMIRKAESVNAALDVSVPLLKPLTIQEAVRYSLLAGGKRVRPLLCIAACELVGGDEATAMSAACAVEMIHTSSLIHDDLPCMDNADLRRGKPTNHKVYGEDMAVLAGDALLALAFEHMTVVSSGLVAPEKMIRAVVELARAIGTTGLVAGQMIDLASERLNPDKVGLEHLEFIHLHKTAALLEAAAVLGVIMGGGTEQEIEKLRKYARCIGLLFQVVDDILDVTKSTEELGKTAGKDVMAGKLTYPRLIGLEGSREVAEKLRREAEEQLLGFDPSKAAPLVALASYIACRHN

SEQ ID NO: 6085 - DNA, 1035 bp, Arabidopsis thaliana
  CDS (1)..(1035)
atggaaaatcgagaagtttttgtttacattgtcatctccatcttccgctctctccaattcttgttttggagattccgtccacgttacaatgatgttacgtctgcgttgacccgccctctgacttcggccgcaagctatgattttaagttcatgtcgtatatggtcaataaggctaagtccgtcaataaagcactagaagaggctgttcctctccgcgagccagaactcaagatccgtgaggccatgaggtacacgcttctctccgatgggaagcgtgtaagaccaatgctttgcttagctgcatgcgagctcgtggggggacaagagtcaaccgcaatgtccgctgcatgtgcgattgagatgctccacgcgtcgtctctcatcctagacgacctcccttgtatggacaacgacagcctccgacgtggaaaacccactaaccatatagtctttggcgagagtatagccatattagcttctcaagcgctcatagctttggctgtccaaaagaccacgtcatccacctttgcggacgttcccccagagaggattctcaagaccgttcaggagatggttaaagcagtggaagggcttgttgcaggtcaacaggcggatttggctggagaaggtatgagatttgatagtgacactggattagagcatcttgagtttatacatattcataaaacggcggcgttgcttgaagccgcagctgttatgggagctataatgggaggtgggtctgatgaagagattgagaggcttcggagttacgcaagatgtattgggttaatgtttcaggttgtggacgatgtgcttgatgtgaccaaatcgtcggaagagctcgggaaaaccgccggtaaagatttgatcgccggaaaactgacgtatccgagactgatgggagtggagaaatcgaaagaatatgctgagagattgaacatagaagcgcgggaacatcttctagggtttgatatagacaaggtggctcctttggtgtctctcgctgattacattgtcaacagacaaaactga

SEQ ID NO: 6086 - protein, 344 aa, Arabidopsis thaliana
MENREVFVYIVISIFRSLQFLFWRFRPRYNDVTSALTRPLTSAASYDFKFMSYMVNKAKSVNKALEEAVPLREPELKIREAMRYTLLSDGKRVRPMLCLAACELVGGQESTAMSAACAIEMLHASSLILDDLPCMDNDSLRRGKPTNHIVFGESIAILASQALIALAVQKTTSSTFADVPPERILKTVQEMVKAVEGLVAGQQADLAGEGMRFDSDTGLEHLEFIHIHKTAALLEAAAVMGAIMGGGSDEEIERLRSYARCIGLMFQVVDDVLDVTKSSEELGKTAGKDLIAGKLTYPRLMGVEKSKEYAERLNIEAREHLLGFDIDKVAPLVSLADYIVNRQN

SEQ ID NO: 6087 - DNA, 1074 bp, Arabidopsis thaliana
  CDS (1)..(1074)
atggctactactctcagctcatcctctctcttcatccaattcagaggacggagatacaactccctatcatcattcaacaatctccaaaagcgcaccgttttgtcgctttcttgtgctctatcctcacaaggtggagacatgattccaccagagggaaaaagcaatgatcgcaactctgcctttgacttcaagtcgtatatgatccgtaaagccgaatccgtaagtgcggctctcaacgtttcggtacctctccaagaaccactcacgatacaagaggcggtgcggtactcattactagcgggcggaaaacgtgtgaggcctctcctctgcattgctgcttgtgagctcgtgggtggcgacgaggctactgccatgtcagccgcttgtgcagtcgagatgatccacacgagctcgctaatccatgacgacctcccgtgcatggacgatgccgacctccgtagaggcaagcccaccaaccataaagaatttggagaagacatggcggttttggcgggtgatgcactccttgctttagcgtttgagcacatgacgttcgtgtcaaatgggttggttgcccctgagaggatgatccgtgctgtaatggagctggcaaaggccatagggacaaaagggctagtggctgggcaagtgactgacttatgtagccaaggattgaatccagacgacgtcggattggagcgtctagagttcatccacctccacaaaacggccgccttgttggaggcagcggcagttttaggagccataatgggaggtggaacagaggaagagatcgaaaagctaagaaaatatgcgagatgtattgggctgttgtttcaggtggttgatgatattcttgacgtaacggaatctactaaggaattgggcaagacagccggaaaagatgtaatggccgggaagctgacgtatccaaggctgataggcttggagagatccagggaagttgcggagaaactgagaagagaagcagcggaacagcttctagggtttgattccgacaaggcggcgcctcttgtggctcttgctagctacattgcctgcagacacaactga

SEQ ID NO: 6088 - protein, 357 aa, Arabidopsis thaliana
MATTLSSSSLFIQFRGRRYNSLSSFNNLQKRTVLSLSCALSSQGGDMIPPEGKSNDRNSAFDFKSYMIRKAESVSAALNVSVPLQEPLTIQEAVRYSLLAGGKRVRPLLCIAACELVGGDEATAMSAACAVEMIHTSSLIHDDLPCMDDADLRRGKPTNHKEFGEDMAVLAGDALLALAFEHMTFVSNGLVAPERMIRAVMELAKAIGTKGLVAGQVTDLCSQGLNPDDVGLERLEFIHLHKTAALLEAAAVLGAIMGGGTEEEIEKLRKYARCIGLLFQVVDDILDVTESTKELGKTAGKDVMAGKLTYPRLIGLERSREVAEKLRREAAEQLLGFDSDKAAPLVALASYIACRHN

SEQ ID NO: 6089 - DNA, 1083 bp, Arabidopsis thaliana
  CDS (1)..(1083)
atggctaatactgttcatctcagctcatcctctctcttcatccaaaccagaggacgaaaatacaactccatattatcattcaacaatctccaaaaacgcactgttttgtctctctcttgtgctctcacctcacaaggcggcaaagacatgattccaccaaaaggaaaaagcaatgatcgcaactttgcctttgacttcaagtcttatatgatccgtaaagccgaatctgtaagtatggctctcaacgtttcagtacctccccaagatcccctcgcaatccaagaggcggtgcggtactcattactagcgggcggaaaacgtgtgcgacctctgctctgcattgctgcctgtgagcttgtgggaggcgacgaggctactgccatgtcagccgcttgcgcggttgagatgatccacacgagctctctaatccatgacgaccttccgtgcatggacgatgccgacctccgtagaggcaagcccaccaaccacaaggtatttggagaacacatggcggttttggcgggcgatgcactccttgctttggcgtttgagcacatgacggttgtgtcaagtgggttggttgctcctgagaggatgatccgttctgtaactgagctggcaaaggccatcgggacaaaagggttagtggctgggcaagtgagtgacttatgtagccaaggattgaatccatatgacgtcgggttggagcgtctagaattcatccacctacacaaaacggccgccttgttggaggcagcggcggttttaggagctataatcggaggtggaacagaggaagagatccaaaagctaagaaagtatgggagatgtattgggcttttgtttcaggtagttgatgatattattgatgtaacagaatctactgaggaattgggtaagacagccggaaaagacgtaatggcaagaaagctgacgtatccaaggctgataggtttggagagatccagggaagttgcagagaaactgagaagagaagcagcggaacagcttctagggtttgattccaataaggtggcgcctctggtggctcttgctagctacattgcttgcagacacaactga

SEQ ID NO: 6090 - protein, 360 aa, Arabidopsis thaliana
MANTVHLSSSSLFIQTRGRKYNSILSFNNLQKRTVLSLSCALTSQGGKDMIPPKGKSNDRNFAFDFKSYMIRKAESVSMALNVSVPPQDPLAIQEAVRYSLLAGGKRVRPLLCIAACELVGGDEATAMSAACAVEMIHTSSLIHDDLPCMDDADLRRGKPTNHKVFGEHMAVLAGDALLALAFEHMTVVSSGLVAPERMIRSVTELAKAIGTKGLVAGQVSDLCSQGLNPYDVGLERLEFIHLHKTAALLEAAAVLGAIIGGGTEEEIQKLRKYGRCIGLLFQVVDDIIDVTESTEELGKTAGKDVMARKLTYPRLIGLERSREVAEKLRREAAEQLLGFDSNKVAPLVALASYIACRHN

SEQ ID NO: 6091 - DNA, 885 bp, Vibrio cholerae O1 biovar eltor str. N16961
  CDS (1)..(885): transl_table=11
atgattgaggcgttatcctcataccaacagcgaaataaccagcaactggatcagtggctgaaccgtattccctttcaaaccttgcctttaatcgaggcgatgcgttacgggctactgctcggcggcaaacgggcacggccatatttggtgtacatcacggggcaaatgctcggctgtgagcttagcgacttagacactcctgcctcagccgtggagtgtattcacgcctattcgctgatccatgatgatttgcccgccatggatgatgatgagctgcgccgcggcaagcccacttgccatatccagtttgatgaggccaccgccattttgaccggcgacgccctgcaaaccttggcgtttactattttggcggaaggcgatctttctgctgcaggcgaaacacagcgcgtcgccatgctccaagctcttgccgaagcttctggcgcacaaggcatgtgccttggtcaagcgttagatctggcggcggaaaatcgcttaatttcgctagaggaattggaaaccattcatcgcaataaaaccggcgctttaatgcgctgcgcgatccgtttaggtgctttagccgcaggtgaaaaaggccgcgccatgctaccgcatcttgatcgctatgcagaagcggttggcctcgcgtttcaggttcaagatgacattctcgatatcattagcgataccgaaacccttggtaaaccacagggttctgaccaagaattaaataaaagtacctaccctgctcttttaggcttagaaggagcacaacaaaaagcacacactctgttacaagaagcgcttctggctttagaagcaattccctacaatacggagcatctggaagagttcgcccgatatgtcgtcgagcgcaagaactaa

SEQ ID NO: 6092 - protein, 294 aa, Vibrio cholerae O1 biovar eltor str. N16961
MIEALSSYQQRNNQQLDQWLNRIPFQTLPLIEAMRYGLLLGGKRARPYLVYITGQMLGCELSDLDTPASAVECIHAYSLIHDDLPAMDDDELRRGKPTCHIQFDEATAILTGDALQTLAFTILAEGDLSAAGETQRVAMLQALAEASGAQGMCLGQALDLAAENRLISLEELETIHRNKTGALMRCAIRLGALAAGEKGRAMLPHLDRYAEAVGLAFQVQDDILDIISDTETLGKPQGSDQELNKSTYPALLGLEGAQQKAHTLLQEALLALEAIPYNTEHLEEFARYVVERKN

SEQ ID NO: 6093 - DNA, 885 bp, Bacillus halodurans C-125
  CDS (1)..(885): transl_table=11
gtgagtgtacaactgttacaatttttagatgaaattaaagacatcatcgaagagcggatgcctgcacatattgaacgactaaattctcctgacatgctgaaaaattctatgctttactccttgaaggcaggaggaaaacgaattcgaccagcgctgctattggcaacgatgaaaagttttcaaaaggatatttcacaggggattgaccttgcctgtgcgattgagatgattcatacgtactcgctcattcatgatgacctcccatcgatggatgatgatgatattcgccggggaaaaccgacgaaccataaagtgttcggagaagctcatgccattcttgcaggggatgcattattaacgtacagctttgagattgtggccaaaatgaaaggtgttgacccggccaaaacactctgcttgatcgaagagcttgcaagggctgctggaccagaaggaatggtaggcggacaagtagctgatatcgaaggagaaaatcaaaaactaacggtcgagggacttgaatatatccaccatcataaaacaggggcgcttctctcgttcgccattgttgcaggggcaaggcttgcggatgcatctgaacaagatattgagaacatacgtagattttcaagagaattaggcttactctttcaaataaaagatgatattttagatgttgaaggggatcaagctgccattggtaaaccagttggaagcgatgatggaaatcaaaaaagcacctatccaagcctattaaccctcgaaggggcaaaagagaagcttcacttgcatactttgctggcaaaggaatatttatatagtgttcaaatgaaccatcgcttattagaggaattaacggattatgtcgtgaatcgtaaccattag

SEQ ID NO: 6094 - protein, 294 aa, Bacillus halodurans C-125
MSVQLLQFLDEIKDIIEERMPAHIERLNSPDMLKNSMLYSLKAGGKRIRPALLLATMKSFQKDISQGIDLACAIEMIHTYSLIHDDLPSMDDDDIRRGKPTNHKVFGEAHAILAGDALLTYSFEIVAKMKGVDPAKTLCLIEELARAAGPEGMVGGQVADIEGENQKLTVEGLEYIHHHKTGALLSFAIVAGARLADASEQDIENIRRFSRELGLLFQIKDDILDVEGDQAAIGKPVGSDDGNQKSTYPSLLTLEGAKEKLHLHTLLAKEYLYSVQMNHRLLEELTDYVVNRNH

SEQ ID NO: 6095 - DNA, 888 bp, Pasteurella multocida subsp. multocida str. Pm70
  CDS (1)..(888): transl_table=11
atgtaccaactttcacaagacttaccccaactccaacaacgtattaatacttttttagcgcaacaattgaatgtggacagcagcccctctcctcttgccgaagccatgcgttacggtgtgctccttggtggtaaacgtatccgtcctttcctagtgtatgcaacaggacgaatgctcggcgcagacttaaaccaactcgattatgccgcggcgagtgtagaagccgttcatgcctattcattaattcacgacgatctccctgcgatggatgatgatcatttacgtcgtggacaaccaacttgccatattgcttttgatcacgccaccgcgattttagccggtgacgcgttgcaagcctttgcttttgaaatattaactcaagcacctgcattgcaagcagagcaaaaacttgcgttggtacaaacgctaagtcaagcagctggtgtaaaaggaatgtgtttggggcaaagtctcgatctgatttctgagcaaaaacacattagcttaatcgaattagaacaaattcaccgcaataaaacgggggcaatgctttccgcagcgattcagcttgggcgaatttgttctccgcattttaaaaatgatacgctagcacagcaattacaacggtattcggaagccattggcttagcctttcaagtacaagacgatattttagatattgaaggcgagagtgacattattggtaaaaccgtgggttctgatttattagcagataaaagcacctaccccaaattattaggcttagcgggtgccaaacaaaaagcgcaagaactgtatcaaaacgcaatcgcggaattagaaagtattccttttgatacaagtgcacttcgtgctatcgctgaatttgtggtaaatagaaaaagttaa

SEQ ID NO: 6096 - protein, 295 aa, Pasteurella multocida subsp. multocida str. Pm70
MYQLSQDLPQLQQRINTFLAQQLNVDSSPSPLAEAMRYGVLLGGKRIRPFLVYATGRMLGADLNQLDYAAASVEAVHAYSLIHDDLPAMDDDHLRRGQPTCHIAFDHATAILAGDALQAFAFEILTQAPALQAEQKLALVQTLSQAAGVKGMCLGQSLDLISEQKHISLIELEQIHRNKTGAMLSAAIQLGRICSPHFKNDTLAQQLQRYSEAIGLAFQVQDDILDIEGESDIIGKTVGSDLLADKSTYPKLLGLAGAKQKAQELYQNAIAELESIPFDTSALRAIAEFVVNRKS

SEQ ID NO: 6097 - DNA, 888 bp, Pseudomonas aeruginosa PAO1
  CDS (1)..(888): transl_table=11
atgatcgcggcctaccaggcgcgctgccaggcgcgcgtcgatgccgccctggacgccctgttcgtcgctccccgcgaagaactgcaacgcctctacgaggccatgcgctacagcgtgatgaacggtggcaagcgggttcgcccgctgctcgcctacgccgcctgcgaggccctcggcggagcgccgcagcgcgccgacgccgcggcctgcgcggtggagctgatccatgcctactcgctggtccacgacgacctgccggcgatggacgacgacgacctgcgccgtggccagccgaccacccaccgggccttcgacgaagccaccgcgatcctcgccgccgacggcttgcaggcgctggccttcgaagtgctcgccgacacccggcgcaatccgcaggaacatgccgtctgtctggaaatgctcacccgcctggcgcgcgccgcaggctccgccggcatggtcggcggccaggcgatcgacctcggctcggtcggcgtggccctcgaccaggcggccctggaagtcatgcaccggcacaagaccggcgcgctgatcgaagccagcgtgcgcctcggcgccctcgccagcggtcgcgccgagcccgcctcgctggccgccctggagcgctacgccgaagcgatcggcctggccttccaggtgcaggacgacatcctcgacgtggaaagcgacaccgccaccctcggcaagacccagggcaaggaccaggcgcacaacaagccgacctatcccgccctgctcggcctggaggccgccaaaggctatgccctggagctgcgcgacctggccctggccgccctcgacggttttccgccgagcgccgacccgctgcgccaactggcccgctacatcgtcgagcgacgcaactga

SEQ ID NO: 6098 - protein, 295 aa, Pseudomonas aeruginosa PAO1
MIAAYQARCQARVDAALDALFVAPREELQRLYEAMRYSVMNGGKRVRPLLAYAACEALGGAPQRADAAACAVELIHAYSLVHDDLPAMDDDDLRRGQPTTHRAFDEATAILAADGLQALAFEVLADTRRNPQEHAVCLEMLTRLARAAGSAGMVGGQAIDLGSVGVALDQAALEVMHRHKTGALIEASVRLGALASGRAEPASLAALERYAEAIGLAFQVQDDILDVESDTATLGKTQGKDQAHNKPTYPALLGLEAAKGYALELRDLALAALDGFPPSADPLRQLARYIVERRN

SEQ ID NO: 6099 - DNA, 846 bp, Campylobacter jejuni subsp. jejuni NCTC 11168
  CDS (1)..(846): transl_table=11
gtgaatttaaaagaactttttatccatcacttagaaaaaaatctacccaaagttgaaagctttcatccttttttcaatgaagctttagcacttatgttaaaagcaggaggaaagcattttcgcgcacaattgcttttaagcgtagtgcaaagcaataaacctgaacttttaaatcaagctttagatgtagctttagctttggaatttatccatacttattcactcatacacgatgatttacccgctatggataatgcggactttagacgaggaattccaaccttacacaaaagctacgatgaaactacagccatcttagtaggtgatgctttaaataccgaagcttttttagttctaagtcatgctcatttaaaagatgaaatcaaaatcaaactcatcaaaacccttgcctttaatgcaggacttaatggaatggtcataggacaagctattgattgtttttttgaagacaaaagactgagtttaaatgaacttgagtttttgcatacacataaaaccgcaagattgatcgccgcagctttaaaaatgggttgtgaaatttgcgaacttaacaacgaagaaagcaatcaaatttacaaacttggtttaaaactaggactgatttttcaaatcaatgatgatattatcgatgtaactacaagtcaagaacaaagcggaaagcctaccaacaacgatattcataaaaattcttttgtcaatttgcttggacttgaacaagccataaaaacaaaagaaaatcttcttagtgaatgcgaacaagacttagaaaaacttaatgaaaaactcgcacaaatgatacaaaatttaataattcaatacttataa

SEQ ID NO: 6100 - protein, 281 aa, Campylobacter jejuni subsp. jejuni NCTC 11168
MNLKELFIHHLEKNLPKVESFHPFFNEALALMLKAGGKHFRAQLLLSVVQSNKPELLNQALDVALALEFIHTYSLIHDDLPAMDNADFRRGIPTLHKSYDETTAILVGDALNTEAFLVLSHAHLKDEIKIKLIKTLAFNAGLNGMVIGQAIDCFFEDKRLSLNELEFLHTHKTARLIAAALKMGCEICELNNEESNQIYKLGLKLGLIFQINDDIIDVTTSQEQSGKPTNNDIHKNSFVNLLGLEQAIKTKENLLSECEQDLEKLNEKLAQMIQNLIIQYL

SEQ ID NO: 6101 - DNA, 900 bp, Escherichia coli O157:H7 EDL933
  CDS (1)..(900): transl_table=11
atggactttccgcagcaactcgaagcctgcgttaagcaggccaaccaggcgctgagccgttttatcgccccactgccctttcagaacactcccgtggtcgaaaccatgcagtatggcgcattattaggtggtaagcgcctgcgacctttcctggtttatgccaccggtcatatgttcggcgttagcacaaacacgctggacgcacccgctgccgccgtagagtgtatccacgcttactcattaattcatgatgatttaccggcgatggatgatgacgatctgcgtcgcggcttgccgacctgccatgtgaagtttggcgaagcgaacgcgattctcgctggcgacgctttacaaacgctggcgttctcgattttaagcgatgctgatatgccagaagtgtcggatcgcgacagaatttcgatgatttctgaactggcgagcgccagcggtattgccggaatgtgtggtggtcaggcgttggatttagacgcggaaggcaaacacgtacctctggacgcgcttgagcgtattcatcgtcataaaacaggcgcattaattcgcgccgccgttcgccttggtgcattaagcgccggagataaaggacgtcgtgctctaccagtactcgacaagtacgcagagagcatcggccttgccttccaggttcaggatgacatcctggatgtggtgggagatactgcaacgttgggaaaacgtcagggtgccgaccagcagcttggcaaaagtacctaccctgcactcctgggtcttgagcaagcccggaagaaagcccaggatctgatcgacgatgcccgccagtcgctgaaacaactggctgaacagtcgatcgatacttcggcactggaagcgctagcggactacatcatccagcgtaataaataa

SEQ ID NO: 6102 - protein, 299 aa, Escherichia coli O157:H7 EDL933
MDFPQQLEACVKQANQALSRFIAPLPFQNTPVVETMQYGALLGGKRLRPFLVYATGHMFGVSTNTLDAPAAAVECIHAYSLIHDDLPAMDDDDLRRGLPTCHVKFGEANAILAGDALQTLAFSILSDADMPEVSDRDRISMISELASASGIAGMCGGQALDLDAEGKHVPLDALERIHRHKTGALIRAAVRLGALSAGDKGRRALPVLDKYAESIGLAFQVQDDILDVVGDTATLGKRQGADQQLGKSTYPALLGLEQARKKAQDLIDDARQSLKQLAEQSIDTSALEALADYIIQRNK

SEQ ID NO: 6103 - DNA, 876 bp, Streptococcus pneumoniae TIGR4
  CDS (1)..(876): transl_table=11
atgaaaaagcaagaaaaattagctcttgtcgagtcggctttggaagatttttatggagaccagcagtttgcctctagtttacgggagtctgttctctattctattcatgctggtggcaagcgtattcggccttttctcttgttagaagttctggaagccttgcaggttaccatcaaacctgctcacgcgcaggtagctactgccttagagatgattcatacagggagcttgattcacgatgaccttcctgctatggatgatgacgattatcgaagagggcggttaaccaatcacaagaaattcggtgaagctatggccattttggctggagatgccttattcttagactcatatgccttgattgcgcaggcagatttgccaagtcagattaaggtggacttgattgccaacttatcccttgcttcaggtagtctgggtatggtagcagggcaagttttggatatggagggcgaacaccagcacttgtctttggaagaacttcagactattcatgccaataagactgggaagttactagcctatcccttccaagcggcagctattatagctgaattgtcacctgaaatgcaggtgaagctgaaaactgtgggtgaattgattggacttgcttttcaagtcagagatgatgtactggatgtgacagctagttttgaggaaatcggcaagacacctcaaaaggatctgcaggcagaaaaatcaacctatcctgccctgttgggcttggaagagtccattgccttttgtaaccaaaccctggatcaagctaatgaaaaattagaagaaattgcccagcagcttccctttgaaacagaatcgattgtaagtgtagtagaaagtttgagaatcaatggctaa

SEQ ID NO: 6104 - protein, 291 aa, Streptococcus pneumoniae TIGR4
MKKQEKLALVESALEDFYGDQQFASSLRESVLYSIHAGGKRIRPFLLLEVLEALQVTIKPAHAQVATALEMIHTGSLIHDDLPAMDDDDYRRGRLTNHKKFGEAMAILAGDALFLDSYALIAQADLPSQIKVDLIANLSLASGSLGMVAGQVLDMEGEHQHLSLEELQTIHANKTGKLLAYPFQAAAIIAELSPEMQVKLKTVGELIGLAFQVRDDVLDVTASFEEIGKTPQKDLQAEKSTYPALLGLEESIAFCNQTLDQANEKLEEIAQQLPFETESIVSVVESLRING

SEQ ID NO: 6105 - DNA, 915 bp, Agrobacterium tumefaciens str. C58
  CDS (1)..(915): transl_table=11
atggacgctcagatgacgaatttcgaaacgcggctgcgcgaaaacgcggcgaaaaccgaagcgctgcttggccacctgctttccggcgaggcgcgcgcggacgagatcacacgcccgcaaaacctgctagaggccatgcgccatggcgtgctgaacggcggcaaacgcctgcggccttttcttgtcatcgagagtgtcgcccttctgggcggagatgccgaagccggcctccacgtcggcgcagcactcgaatgcctccattgttattcgcttgtccatgacgatctgccagccatggacgacgacgacctgcgccgtggccagccgaccgtgcaccgcaaattcgacgaggcaaccgccatcctcgccggtgacagcctgctgacgcttgctttcgacataatcgcctcggatgacaatccgctggcggccgagcgcaaggccgccctcgttatctcgctcgcgcgtgccgccggtattggtggcatggctggcgggcaggcccttgatctcgctgccgaaaagaaagcgcccgacgaggatggcattattacattgcaggctatgaaaaccggtgccttgctgcgtttcgcctgtgaggccggcgcgatcattgccggcagcaatcaagccgaaaggcagcgactgcgcctcttcggcgaaaagattggcctttccttccagcttgccgacgatcttctggatctgaccgccgatgccgccaccatgggcaaggcgaccggcaaggatgccgcacgcggcaagggcacgctggtggccttacgcggcgaagcatgggcacgcgaaaagcttcaggagcaggtggcggaagccagcgaactcctcgccccctacggcgaaaaggccgcgattctcatcgcggccgcaagattcatcgccgaacggaaaagctga

SEQ ID NO: 6106 - protein, 304 aa, Agrobacterium tumefaciens str. C58
MDAQMTNFETRLRENAAKTEALLGHLLSGEARADEITRPQNLLEAMRHGVLNGGKRLRPFLVIESVALLGGDAEAGLHVGAALECLHCYSLVHDDLPAMDDDDLRRGQPTVHRKFDEATAILAGDSLLTLAFDIIASDDNPLAAERKAALVISLARAAGIGGMAGGQALDLAAEKKAPDEDGIITLQAMKTGALLRFACEAGAIIAGSNQAERQRLRLFGEKIGLSFQLADDLLDLTADAATMGKATGKDAARGKGTLVALRGEAWAREKLQEQVAEASELLAPYGEKAAILIAAARFIAERKS

SEQ ID NO: 6107 - DNA, 915 bp, Sinorhizobium meliloti 1021
  CDS (1)..(915): transl_table=11
atgaaagacgagagatcatcctttccggcgcgcctcaagaccaacgcggtcgcggtcgaagcgctgctcgagacattgctcggtccggccgtgggcacgggcgaaatcgcccgcccggcaaacctgctcggagccatgcgccatggcgtgctcaacggcggcaagcggctgcggccttttctcgtcgccgaaagcacggccctcctcggcggcgatgcggaagcggcgctcagaacaggcgccgcgctcgaatgcatccactgctattcgctcgtccatgacgacctcccggccatggacgacgacgacatgcgccgcggaaagccgacggtgcacgtcgccttcgacgaggcgacggcgatccttgcgggcgacagcctgctgaccttcgccttcgacatcgtcgcggcgccggaaacggcgctctccgaccgtcagaagacgacgctcgtgctggcgctcgcgcgcgccgcggggcatgggggcatggccggcggtcaggcgctcgacctagccgccgaaaagagcgcccccgacgaagcgggcatcgtcctcttgcagtcgatgaagacaggtgccctcatccgcttcgcctgcgaggcgggcgcgatcatcgccgatgcgccggcagaggaccgccgacggctgcgcgccttcggggacaagatcggcctcgccttccagcttgccgacgacctgctcgacctcaccgccgatgccgcaatcgtcggcaaggcgaccggcaaggatgccgcacgggggaagggcacgcttgtctccctgcatggccagccctgggccgagcggcggctcgaaagcctggtggccgaggcggaaggcctgctcgaaccctacggaccacgctcggcgatccttgccgaaaccgcccgcttcatcgccaaccgcaggaactga

SEQ ID NO: 6108 - protein, 304 aa, Sinorhizobium meliloti 1021
MKDERSSFPARLKTNAVAVEALLETLLGPAVGTGEIARPANLLGAMRHGVLNGGKRLRPFLVAESTALLGGDAEAALRTGAALECIHCYSLVHDDLPAMDDDDMRRGKPTVHVAFDEATAILAGDSLLTFAFDIVAAPETALSDRQKTTLVLALARAAGHGGMAGGQALDLAAEKSAPDEAGIVLLQSMKTGALIRFACEAGAIIADAPAEDRRRLRAFGDKIGLAFQLADDLLDLTADAAIVGKATGKDAARGKGTLVSLHGQPWAERRLESLVAEAEGLLEPYGPRSAILAETARFIANRRN

SEQ ID NO: 6109 - DNA, 930 bp, Nostoc sp. PCC 7120
  CDS (1)..(930): transl_table=11
atggtagcagctgataacctccggaagatgtcagaggaagccaaatttaatctagtagcttatcttaaagagcggcaaaaactttgtgaagctgctttggatgcagccatacctattatttatccagaaaaaatttatgaatcaatgcgctactctctattagctggaggtaagcgcctgcgtccgattctttgtctggctacctcggaaatgatgggtgggacaatcgaaatagctatgccaacagcttgtgctgtagaaatgatccacaccatgtctttgattcacgacgacttgccagcaatggataacgacgattatcgtcgcggtatgctgacgaatcacaaggtatatggtgaagatattgcgattttggcgggagatggcttattagcctacgcttttgagttcgtagctatccgtactcctgaaagcgtacctagagaccgagtattgcaggtagtagcccgtttaggacgagcattgggagctgctggcttggttgggggtcaagtggttgacttagactcagaaggaaaatcagatacttccttagaaacactcaattttattcataatcacaaaacagcagctcttttagaagcttgtgtagtctgtggcggcattttagctggggcatcatcagaaaatgtacaaagactctcacgatattctcaaaatattgggctagcatttcaaatcattgatgatattcttgatatcacttctactcaagagcaattaggcaagactgcgggtaaagaccttttagcgaagaaagttacctatcctagcctgtggggaattgaacaatcgcgcgtcaaagcccaacagctaattgaggcagcttgtacagaactagaaccatttggagaagatgcacagcccctgaaagcgatcgctcacttcatcactagtcgtaatcactaa

SEQ ID NO: 6110 - protein, 309 aa, Nostoc sp. PCC 7120
MVAADNLRKMSEEAKFNLVAYLKERQKLCEAALDAAIPIIYPEKIYESMRYSLLAGGKRLRPILCLATSEMMGGTIEIAMPTACAVEMIHTMSLIHDDLPAMDNDDYRRGMLTNHKVYGEDIAILAGDGLLAYAFEFVAIRTPESVPRDRVLQVVARLGRALGAAGLVGGQVVDLDSEGKSDTSLETLNFIHNHKTAALLEACVVCGGILAGASSENVQRLSRYSQNIGLAFQIIDDILDITSTQEQLGKTAGKDLLAKKVTYPSLWGIEQSRVKAQQLIEAACTELEPFGEDAQPLKAIAHFITSRNH

SEQ ID NO: 6111 - DNA, 900 bp, Ralstonia solanacearum GMI1000
  CDS (1)..(900): transl_table=11
atgagcgatttcgcccactggatggcctccgtcgttgcacggacggaaagcgcgctcgaacgcgccctgcccggcgaatcggtcgcgccgcagcgcctgcatgcggcgatgcgctatgccacgctgggggcgggcaagcgggtccgccccctgctcgcgcatgctgccggggcgctgggcgaggcatcgcccgaggcgctggacggcgtgagctgcgcggtggagatgatccacgcctattcgctggtccacgacgacatgccctgcatggacgacgatgacctgcgccgaggtcgcccgacggtgcatcgcgcctatgatgaagcgacggcgctgctggtcggcgacgctttgcagacccaggccttcatcgcgctggccgagctgggcgcggtgagcccggccacgcgcgccggactggtcggcgagttggcgcgcgcgtcgggttcgctcggcatggcgggcgggcaggcgatcgatctgcagagcgttggcgtggccctgtcgcaggatgcgctggagaccatgcaccgcatgaagaccggcgcgctgctgcgggcaagcctgcgcatgggcgccctgtgcgccggcgtgaatgccgcggcgctggaacaggtggacgcctacgcgggcgcggtcggactggcgttccaggtggtcgacgacattctcgacgtgacggccgacaccgccacgctgggcaagaccgccggcaaggacgaggccaacgacaagccgacctatgtgtcgatcctcggcctggagcgcgcgcgggcgctggccgatgcgttgcatgccgcggcgggcgcggcggtggcgcagctgtcccgcgaactgggtgaagcgcgcaccgccaggctggccgggatggccgacctgatcgtgtggcgtggccactga

SEQ ID NO: 6112 - protein, 299 aa, Ralstonia solanacearum GMI1000
MSDFAHWMASVVARTESALERALPGESVAPQRLHAAMRYATLGAGKRVRPLLAHAAGALGEASPEALDGVSCAVEMIHAYSLVHDDMPCMDDDDLRRGRPTVHRAYDEATALLVGDALQTQAFIALAELGAVSPATRAGLVGELARASGSLGMAGGQAIDLQSVGVALSQDALETMHRMKTGALLRASLRMGALCAGVNAAALEQVDAYAGAVGLAFQVVDDILDVTADTATLGKTAGKDEANDKPTYVSILGLERARALADALHAAAGAAVAQLSRELGEARTARLAGMADLIVWRGH

SEQ ID NO: 6113 - DNA, 1008 bp, Agrobacterium tumefaciens str. C58
  CDS (1)..(1008): transl_table=11
ttgccgtcttcaaggcgagtccggtcacgctgttgcgccttcggaatcacgaaaaggtttgcctgcattcgtccggcatgccaaagagcgcgcatggacgctcagatgacgaatttcgaaacgcggctgcgcgaaaacgcggcgaaaaccgaagcgctgcttggccacctgctttccggcgaggcgcgcgcggacgagatcacacgcccgcaaaacctgctagaggccatgcgccatggcgtgctgaacggcggcaaacgcctgcggccttttcttgtcatcgagagtgtcgcccttctgggcggagatgccgaagccggcctccacgtcggcgcagcactcgaatgcctccattgttattcgcttgtccatgacgatctgccagccatggacgacgacgacctgcgccgtggccagccgaccgtgcaccgcaaattcgacgaggcaaccgccatcctcgccggtgacagcctgctgacgcttgctttcgacataatcgcctcggatgacaatccgctggcggccgagcgcaaggccgccctcgttatctcgctcgcgcgtgccgccggtattggtggcatggctggcgggcaggcccttgatctcgctgccgaaaagaaagcgcccgacgaggatggcattattacattgcaggctatgaaaaccggtgccttgctgcgtttcgcctgtgaggccggcgcgatcattgccggcagcaatcaagccgaaaggcagcgactgcgcctcttcggcgaaaagattggcctttccttccagcttgccgacgatcttctggatctgaccgccgatgccgccaccatgggcaaggcgaccggcaaggatgccgcacgcggcaagggcacgctggtggccttacgcggcgaagcatgggcacgcgaaaagcttcaggagcaggtggcggaagccagcgaactcctcgccccctacggcgaaaaggccgcgattctcatcgcggccgcaagattcatcgccgaacggaaaagctga

SEQ ID NO: 6114 - protein, 335 aa, Agrobacterium tumefaciens str. C58
MPSSRRVRSRCCAFGITKRFACIRPACQRARMDAQMTNFETRLRENAAKTEALLGHLLSGEARADEITRPQNLLEAMRHGVLNGGKRLRPFLVIESVALLGGDAEAGLHVGAALECLHCYSLVHDDLPAMDDDDLRRGQPTVHRKFDEATAILAGDSLLTLAFDIIASDDNPLAAERKAALVISLARAAGIGGMAGGQALDLAAEKKAPDEDGIITLQAMKTGALLRFACEAGAIIAGSNQAERQRLRLFGEKIGLSFQLADDLLDLTADAATMGKATGKDAARGKGTLVALRGEAWAREKLQEQVAEASELLAPYGEKAAILIAAARFIAERKS

SEQ ID NO: 6115 - DNA, 915 bp, Brucella melitensis 16M
  CDS (1)..(915): transl_table=11
atggaaaagctgcctgtcgatttcaccactcttcttaaccgccgcgccatggaagtagaagctgcccttgccggtcttctggacgaacgcccgcgcaccggcgagattgcccgtccgcagcgtctcatcgccgccatgcgccatggcgtactgaacggcggcaagcgcctgcgcccgtttctcgtcctcgaaagtgctgcccttttcggacagtacggccaggcggtgctgcgcgtcgctgccgcgctggaatgtatccattgctattcgctggtccatgacgatctgccagccatggatgatgacgatctgcgccggggccagccaaccgtgcacaaggcctttgatgaggcagccgccattctggccggtgatagcctgctgacctacgccttcgacattatcgcatccgatgaaacggaactcgacgccaccacccgcataaagcttgtttgcgcgctcacgcgcgcttccggccttggcggcatggcaggcggacaggcgctcgacctgatggcggaaaccagaaaaccggacgaggcaggcatcatcacgcttcaagccatgaagaccggcgcgctgatccgctttgcctgcgaggcgggcgctatcatcgctggcgcatcgcaggaagaccgggagcgcatggcggaattcggctcggcaatcggcctggccttccagcttgccgacgatcttctggacgtgaccgccgacgctggcaccatgggcaaggcaaccggcaaggatgccgccgccggaaaagccacgctggtttcacttcacggcattgactggacccgccagcagctttcaggcctcgtcgcacaggccgaaagcctgctcgcaccctttggagaagacgccgaacccctcaagcaagcggcccgcttcatcgccgagcggcagaattaa

SEQ ID NO: 6116 - protein, 304 aa, Brucella melitensis 16M
MEKLPVDFTTLLNRRAMEVEAALAGLLDERPRTGEIARPQRLIAAMRHGVLNGGKRLRPFLVLESAALFGQYGQAVLRVAAALECIHCYSLVHDDLPAMDDDDLRRGQPTVHKAFDEAAAILAGDSLLTYAFDIIASDETELDATTRIKLVCALTRASGLGGMAGGQALDLMAETRKPDEAGIITLQAMKTGALIRFACEAGAIIAGASQEDRERMAEFGSAIGLAFQLADDLLDVTADAGTMGKATGKDAAAGKATLVSLHGIDWTRQQLSGLVAQAESLLAPFGEDAEPLKQAARFIAERQN

SEQ ID NO: 6117 - DNA, 894 bp, Fusobacterium nucleatum subsp. nucleatum ATCC 25586
  CDS (1)..(894): transl_table=11
atgaatgatttccaagtttatttaaaagaaaaaactgatttttttgaaactgaattaaaaaaagaattaaaagaactttcctatcctgaaactattgctaagggtatggaatatgctattttaaatggtggaaagagattaagaccttttttactttttgtaacattagaattgttaaatgagaatataaataaaggtgtaaaatctgcaatagcattagagatgatacattcatattctcttgttcatgatgatttgccagctcttgacaatgatgattataggagagggaaattaacaacacataaagtttttggtgaagcagagggaatacttataggagattcacttttaacttatgctttttatgttctttctcagaaaaatttagaattgttgtcttctaaacagattgtgaatattatttcaaaaacttctgaatatgcaggaatagatggaatgataggtggacagatgatagatattcaaagtgaaaacaaaaaaatagatttggaaactttaaaatacattcatagtcataaaacaggaaagcttattaaacttcctattgagatagcttgtatcattgctaatttagaaaaagataaaagagaagttttagaagaatatgcagatttaattggtttggcttttcaagttaaagatgatattctggatgttgaaggaacttttgaagatttaggaaaacctgtgggcagtgatgttgatttacataaggctacttatccaagtattttagggatggaagaaagtaaaaaaattttaaataatactgttgaaaaagctaaggaaattattaaaaataaatttggagaagaaaaaggaaaagttttaatttctcttgcagattttataaaagatagaaaaaaataa

SEQ ID NO: 6118 - protein, 297 aa, Fusobacterium nucleatum subsp. nucleatum ATCC 25586
MNDFQVYLKEKTDFFETELKKELKELSYPETIAKGMEYAILNGGKRLRPFLLFVTLELLNENINKGVKSAIALEMIHSYSLVHDDLPALDNDDYRRGKLTTHKVFGEAEGILIGDSLLTYAFYVLSQKNLELLSSKQIVNIISKTSEYAGIDGMIGGQMIDIQSENKKIDLETLKYIHSHKTGKLIKLPIEIACIIANLEKDKREVLEEYADLIGLAFQVKDDILDVEGTFEDLGKPVGSDVDLHKATYPSILGMEESKKILNNTVEKAKEIIKNKFGEEKGKVLISLADFIKDRKK

SEQ ID NO: 6119 - DNA, 975 bp, Methanosarcina mazei Go1
  CDS (1)..(975): transl_table=11
gtgatgcttatgacgcttgttgatgaaattaaaaatcgaagttcccatgttgatgctgcaatcgacgaattgcttccggtaacccggcctgaagagctgtataaagcttcccgttacctcgtggacgccggtgggaagcgccttcgtccggcagtcctcatcctggctgctgaagctgtcggttccaatctcaggtctgttttgcccgcagcagtcgcggtggaacttgtgcacaatttcactctgatccatgacgacattatggatagggatgatatccgcaggggaatgcctgcagttcacgtaaaatggggagaagccggagcaattcttgccggcgacaccctttattccaaagccttcgaaatcctctcaaaagtcgaaaacgagcctgtgagggttttaaagtgcatggatgtcctttcaaagacctgcaccgaaatctgcgaaggccagtggctcgatatggatttcgaaacccggaaaaaggttactgaatccgagtaccttgagatggtggaaaagaagacctctgtcctctatgcagccgcagccaaaatcggcgcccttttaggaggggcttctgacgaagttgccgaggctttatccgagtacggacgcctcataggaataggcttccagatgtatgatgacgtccttgatatgaccgcacctgaagaagttcttggaaaggtaaggggcagcgaccttatggaaggaaaatacacccttattgtcataaatgctttcgagaaaggcgtgaagctggatattttcggaaaaggtgaagcaactctcgaagagaccgaagcggcagtcaggactcttacagaatgcgggtctctcgattatgtgaaaaaccttgcaatttcatatatagaagaaggcaaagaaaaactggatgtcctcagggactgtcctgaaaaaacccttctcctgcagattgctgactatatgatctcacgagaatactaa

SEQ ID NO: 6120 - protein, 324 aa, Methanosarcina mazei Go1
MMLMTLVDEIKNRSSHVDAAIDELLPVTRPEELYKASRYLVDAGGKRLRPAVLILAAEAVGSNLRSVLPAAVAVELVHNFTLIHDDIMDRDDIRRGMPAVHVKWGEAGAILAGDTLYSKAFEILSKVENEPVRVLKCMDVLSKTCTEICEGQWLDMDFETRKKVTESEYLEMVEKKTSVLYAAAAKIGALLGGASDEVAEALSEYGRLIGIGFQMYDDVLDMTAPEEVLGKVRGSDLMEGKYTLIVINAFEKGVKLDIFGKGEATLEETEAAVRTLTECGSLDYVKNLAISYIEEGKEKLDVLRDCPEKTLLLQIADYMISREY

SEQ ID NO: 6121 - DNA, 876 bp, Xanthomonas campestris pv. campestris str. ATCC 33913
  CDS (1)..(876): transl_table=11
gtgagcgcggcgttgtttgagcgctgggttgctcgcaccgaacggcagctggacgcctgccttcccagccccgccctcgccccgcagcgtctgcacgcggccatgcgccacgccgtgctcggtggcggcaagcgcatgcgtccgctgttggtctatgcaagcggtgccttgttcggcgccgaagaaggcagcctggatgcgccggcggtggcggtggaactgatccacgcgtattcgctggtgcacgatgacctacccgcgatggacgatgacgcgctgcgtcgcggccaccctacggtgcacatcgccttcgacgaagccactgcgatcctggccggcgatgccttgcaggcacgcgcattcgaactgctggccgaggcaccggcagatgcggcactgcgggtgggctggttgcagagcctggcatctgccgccggtgcggccggcatgtgtggcgggcaggcgctggatatcgacgccaccgggcaggtgcaggcgctggaggcactgcagcgcatgcatgcactcaagaccggtgcgctgatccgcgccgcggtgcgcatgggcgtgctgacaggcggcgcgggtattgccgaccagcagcgcctggatgcgtttgccgacgcgctggggctcgcgttccaggtgcgtgacgacatcctggatgtggaatcaagctccgcccagctcggcaagactgccggcaaggatgcggcgcagtccaagtccacctaccccgccttgctgggcatggacggcgccaaaaccaagctggcggaactggccagccatatgcatgcgctgttgctgccctacggcgaatccggcgccaccttggccagcctcggccgcttcgcggtcgaccgcgcccactag

SEQ ID NO: 6122 - protein, 291 aa, Xanthomonas campestris pv. campestris str. ATCC 33913
MSAALFERWVARTERQLDACLPSPALAPQRLHAAMRHAVLGGGKRMRPLLVYASGALFGAEEGSLDAPAVAVELIHAYSLVHDDLPAMDDDALRRGHPTVHIAFDEATAILAGDALQARAFELLAEAPADAALRVGWLQSLASAAGAAGMCGGQALDIDATGQVQALEALQRMHALKTGALIRAAVRMGVLTGGAGIADQQRLDAFADALGLAFQVRDDILDVESSSAQLGKTAGKDAAQSKSTYPALLGMDGAKTKLAELASHMHALLLPYGESGATLASLGRFAVDRAH

SEQ ID NO: 6123 - DNA, 924 bp, Thermosynechococcus elongatus BP-1
  CDS (1)..(924): transl_table=11
atgatttccgctgatcccccccaagtccatcccgccggcacatttgatctcaaggcctacctcaaagaacgccaagcccttgtggaagctgcccttgaagcctcgattccggtggcctatccggagaaaatttacgatgcgatgcgctattcactgatggcggggggcaagcggctgcgcccgattctctgtttggccacctgtgaactgatggggggcaccgtggaaatggccatgccgactgcctgtgccttggagatgatccatacgatgtcgctcatccacgatgatctaccggccatggacaatgacgactaccgtcgcggcaagcccaccaatcacaaggtctatggtgaagatattgccattctggcgggggatggcttactggcctatgcctttgagtatgtggtggaacaaaccaagaatgtacccgcggagtatctgttgaaaattgtggcgcggttggggcatgcggtggcagcaacgggcttagtcggtggtcaagtggtggacttagagtgtgaaggacagcccgacattggtctggaaacgctgcattttatccactcccacaaaacgggggccctactggaggcctctgtggtgtctggggcattgctgacgggggcgcatgaatctgacgtggcacgcctgtcccgttatgcggcaaatattggcttggcattccagattgtggatgacattttggatattacttcgacccgcgatgtcctcggtaaaaccgttggtaaagatgtggctgcccaaaaaatgacctacccgcgcctgtggggtctggaaaaatctcgccaagaggctgagcgcttggtggcggaggcgaaggcagagttggctgtatatggggcggccgctgttcctttgcaggcgatcgccgactacattaccagccgtagtcattaa

SEQ ID NO: 6124 - protein, 307 aa, Thermosynechococcus elongatus BP-1
MISADPPQVHPAGTFDLKAYLKERQALVEAALEASIPVAYPEKIYDAMRYSLMAGGKRLRPILCLATCELMGGTVEMAMPTACALEMIHTMSLIHDDLPAMDNDDYRRGKPTNHKVYGEDIAILAGDGLLAYAFEYVVEQTKNVPAEYLLKIVARLGHAVAATGLVGGQVVDLECEGQPDIGLETLHFIHSHKTGALLEASVVSGALLTGAHESDVARLSRYAANIGLAFQIVDDILDITSTRDVLGKTVGKDVAAQKMTYPRLWGLEKSRQEAERLVAEAKAELAVYGAAAVPLQAIADYITSRSH

SEQ ID NO: 6125 - DNA, 885 bp, Oceanobacillus iheyensis HTE831
  CDS (1)..(885): transl_table=11
gtgaatgaaaacttacaaagatatttagagatatatcgtgagaaattggaagcaacatataatacttatttttcacatttagatatcccgaataatttaaaagaatccatgctatattcattaaatgcaggcgggaagcgattaaggccaatattaatattggctagctatgaggtatacggaaaaacattagataaagtgatgtcctcagcagttgcaatagaaatgattcatacgtattcacttattcatgatgatttgcctgccatggatgatgatgattatcgtcgaggcaagttaacaaatcacaaacaattcaatgaagcaacagcaatattggctggagatgcattactaacgtatagttttcaattaattagttcagatgacctactaacttctgatgaaaaagtggagttaatacgaatattatctgaagcgagtggaccagctgggatggtcgctggtcaaatattggatatggaagctgaaaaacaagctgttacacttgaagaaatggaagaaattcacgcattaaaaactggagagttaattcggtttgcaattattgctggagcatatcttggtggagcaacagacaatcagttaaaacaccttactgattatgcttattatttaggcttaatttttcaagtgcaggacgatatcttagacataactggagatgcgtcgaagattgggaaaccagtgggtagcgatgaactgaatgaaaaaagcacgtatccgaaattattaggattgcaaggtgctatcgatcagaaaaatctctatgttgaaaaagcctacaaaagtctacatttggctggagcagaagattctctgctcgctgaattgacaaagtatttcagtgagcgtgatcattag

SEQ ID NO: 6126 - protein, 294 aa, Oceanobacillus iheyensis HTE831
MNENLQRYLEIYREKLEATYNTYFSHLDIPNNLKESMLYSLNAGGKRLRPILILASYEVYGKTLDKVMSSAVAIEMIHTYSLIHDDLPAMDDDDYRRGKLTNHKQFNEATAILAGDALLTYSFQLISSDDLLTSDEKVELIRILSEASGPAGMVAGQILDMEAEKQAVTLEEMEEIHALKTGELIRFAIIAGAYLGGATDNQLKHLTDYAYYLGLIFQVQDDILDITGDASKIGKPVGSDELNEKSTYPKLLGLQGAIDQKNLYVEKAYKSLHLAGAEDSLLAELTKYFSERDH

SEQ ID NO: 6127 - DNA, 999 bp, Leptospira interrogans serovar Lai str. 56601
  CDS (1)..(999): transl_table=11
ttggtttgtcggactttgctttacaattggaagttttctttcagttttggagttagagtgaattcatcttccttttccaaaatattccattcttacaaaagtacgtttgaaaattttttaaattctcaaactctttcgatactttctaaacaatctgctcctgaactttttgaagctatgaaatatagtctcgtagccggagggaagcgacttagacccgttttggctttggctgcttttggtggacttcaaaatgaaactcaaaacgttcttttacttggagcttctttggaatgtattcatacttattctttgattcacgacgatcttccaagtatggataacgacgattttagaagggggttgccgactcttcataaaaaattttccgaatctacggcgattttggccggagacgctttaaactctttcgcattttattttatttcttggatccgggttgaaaatggtgatcattttttacataggaatctattagaaattttgcatgcaggttgtggggcacctggaatggtttccggacaagtttatgatttacagatggaaagagaaaatgtgaaagaaaatgattcaacaaaccaatccgataagatagagatgcttcaattgactcaccgtttaaaaacgggagcgttgattaagtcagccttattgttagggaaccgtcttcgtaaagattggaaaaaaagagaaacgtctttatctcaatacggagaagatctaggtttactgtttcagattacagacgatattttagacgtggaaggaactcaggaatctttaggaaaaaccccaggtaaggatcaaaaatctggcaagatcacctatcctatgttattcggaatggatcgttgtaaaaagatggtagaagaacttcagaaaaatctaatttttacttcttctgattttgtttccacagaagaagaacaaacattctttcaggagcttccgatttacattggccagagaaaaaattag

SEQ ID NO: 6128 - protein, 332 aa, Leptospira interrogans serovar Lai str. 56601
MVCRTLLYNWKFSFSFGVRVNSSSFSKIFHSYKSTFENFLNSQTLSILSKQSAPELFEAMKYSLVAGGKRLRPVLALAAFGGLQNETQNVLLLGASLECIHTYSLIHDDLPSMDNDDFRRGLPTLHKKFSESTAILAGDALNSFAFYFISWIRVENGDHFLHRNLLEILHAGCGAPGMVSGQVYDLQMERENVKENDSTNQSDKIEMLQLTHRLKTGALIKSALLLGNRLRKDWKKRETSLSQYGEDLGLLFQITDDILDVEGTQESLGKTPGKDQKSGKITYPMLFGMDRCKKMVEELQKNLIFTSSDFVSTEEEQTFFQELPIYIGQRKN

SEQ ID NO: 6129 - DNA, 888 bp, Pseudomonas putida KT2440
  CDS (1)..(888): transl_table=11
atgattggcacctaccaggccagttgccaggcgcgcgtcgacgcagccctcgaaccgctgttcatcgccccgagcaaagagctggaacgcctttacgccgccatgcgctacagcgtgatgaacggcggcaaacgcgtgcgcccgttgctggcctacgcggcctgcgaagccttgggcgccccggccgaacaggccaacggtgcagcctgcgcggtcgagctgatccatgcttactcgctggtgcatgacgacctcccggccatggacgacgacgacctgcgtcgcggccagccgaccacccacaaggcgtttgacgaagcgtgcgccatccttgctggcgacggtttgcagagcctggctttcagtgccctgctcgacccttgcctgagccctcagatcgacagcattcgcctggccatggttcaggtgctggccaaagctgccggcccggccggcatggttggcggccaggccatcgatctcggttcggtgggccagaagctggaccagcaggcgctggagttcatgcaccggcacaagaccggcgcgctgatcgaagccagcgtacgcctcggcgccctggcaagtgcccgtgccgaaccggtgcagctggatgccctgcaaacttatgcacaggccattggcctggcattccaggtgcaggacgacatcctcgacgtggaaagcgacactgctaccttgggcaaacgccaaggtgcagacatagcgcgtgacaaaccgacctacccggccctgctgggcctggaagccgccaaagcctatgcaatcgaactgcgcgaccaggcgctggccgcactgcaagggttcggcgaaaaggccgagccgctgcgggccttggcgcgttatattgtcgaacgccgtaactaa

SEQ ID NO: 6130 - protein, 295 aa, Pseudomonas putida KT2440
MIGTYQASCQARVDAALEPLFIAPSKELERLYAAMRYSVMNGGKRVRPLLAYAACEALGAPAEQANGAACAVELIHAYSLVHDDLPAMDDDDLRRGQPTTHKAFDEACAILAGDGLQSLAFSALLDPCLSPQIDSIRLAMVQVLAKAAGPAGMVGGQAIDLGSVGQKLDQQALEFMHRHKTGALIEASVRLGALASARAEPVQLDALQTYAQAIGLAFQVQDDILDVESDTATLGKRQGADIARDKPTYPALLGLEAAKAYAIELRDQALAALQGFGEKAEPLRALARYIVERRN

SEQ ID NO: 6131 - DNA, 900 bp, Escherichia coli CFT073
  CDS (1)..(900): transl_table=11
atggactttccgcagcaactcgaagcctgcgttaagcaggccaaccaggcgctgagccgttttatcgccccactgccctttcagaacactcccgtggtcgaaaccatgcagtatggcgcattattaggtggtaagcgcctgcgacctttcctggtttatgccactggtcatatgttcggcgttagcataaacacactggacgcacccgctgccgccgtagagtgtatccacgcttactcattaattcatgatgatttaccggcgatggatgatgacgatctgcgtcgcggtttgccgacctgccatgtgaagtttggcgaagcaaacgcgattctcgctggtgacgctttacaaacgctggcgttctcgattctaagcgatgccgatatgccggaagtgtcagatcgcgacagaatttcgatgatttctgagctggcgagcgccagcggtattgccggaatgtgcggtggtcaggcattagatttagacgctgaaggcaaacacgtacctctggacgcgcttgagcgtattcatcgtcataaaaccggcgcattgattcgcgccgccgttcgccttggtgcattaagcgccggagataaaggacgaaatgcactgccagtactcgacaagtacgcagagagcatcggccttgccttccaggttcaggatgacatcctggatgtggtgggagatactgcaacgttgggaaaacgccagggtgccgaccagcaacttggtaaaagtacctaccctgcacttctgggtcttgagcaagcccggaagaaagcccgggatctgatcgacgatgcccgtcagtcgctgaaacaactgactgaacagtcactcgatacctcggcactggaagcgctagcggactacatcatccagcgtaataaataa

SEQ ID NO: 6132 - protein, 299 aa, Escherichia coli CFT073
MDFPQQLEACVKQANQALSRFIAPLPFQNTPVVETMQYGALLGGKRLRPFLVYATGHMFGVSINTLDAPAAAVECIHAYSLIHDDLPAMDDDDLRRGLPTCHVKFGEANAILAGDALQTLAFSILSDADMPEVSDRDRISMISELASASGIAGMCGGQALDLDAEGKHVPLDALERIHRHKTGALIRAAVRLGALSAGDKGRNALPVLDKYAESIGLAFQVQDDILDVVGDTATLGKRQGADQQLGKSTYPALLGLEQARKKARDLIDDARQSLKQLTEQSLDTSALEALADYIIQRNK

SEQ ID NO: 6133 - DNA, 924 bp, Bradyrhizobium japonicum USDA 110
  CDS (1)..(924): transl_table=11
atgaccggcacgtccccgtccgatttcgccaaacgtctggacaagaccgctgatgataccgaggccctgctcgggcgcctcctcgcggacgacatcctgcccgatgaaatcgcccgtcccaagcgactgatggacgcaatgcgctattcgagcctgaacggcggcaagcgcctgcggccgttcctggtggttgaaagcgcagccgtgttcggcgtgccgcgcgaggcggcgctgctcgccggtgcggcgctcgaatgcatccactgctattcgctgatccatgacgacctgccggcgatggacaattcggacctgcgccggggccggcccaccctgcacaagaagaccgacgacgcgaccgcgatcctcgccggcgacggcctgctgacgctcgccttcgatatcgtcacccgcgacgagatccatcgcgacgccaatgtacggctgctgctgacgcgcgcgctggcgcgctgcgccggcatcggcggcatggtcggtggccagattctcgacctcgcaggcgaaggccgtttcggcggcaacgagccgatcgatgtcgcccgcattcagcagatgaagaccggcgcgctgctgcgctacggctgcatcgccggcgcgattctcggccaggccacggccaaggaatatcaggcgctcgacgattacggccgcgcgctcggcgaagccttccagatcgccgacgatctgctcgacgtcgaaggcgatgccgcggcgctcggcaaaccttcgggccaggatgctgcgctcggcaagaccaccttcgtcacccagctcggcatcgaaggcgccaagcagcgcgtgcgcgacctgctcgcgcgggccgacagcgcggtctcgatcttcggcgaccgcgccgccgtgctgcaagccgccgcgcggttcgtcgccgagcgcaagaactga

SEQ ID NO: 6134 - protein, 307 aa, Bradyrhizobium japonicum USDA 110
MTGTSPSDFAKRLDKTADDTEALLGRLLADDILPDEIARPKRLMDAMRYSSLNGGKRLRPFLVVESAAVFGVPREAALLAGAALECIHCYSLIHDDLPAMDNSDLRRGRPTLHKKTDDATAILAGDGLLTLAFDIVTRDEIHRDANVRLLLTRALARCAGIGGMVGGQILDLAGEGRFGGNEPIDVARIQQMKTGALLRYGCIAGAILGQATAKEYQALDDYGRALGEAFQIADDLLDVEGDAAALGKPSGQDAALGKTTFVTQLGIEGAKQRVRDLLARADSAVSIFGDRAAVLQAAARFVAERKN

SEQ ID NO: 6135 - DNA, 891 bp, Lactobacillus plantarum WCFS1
  CDS (1)..(891): transl_table=11
atgaataagcaattattaactgaatttgaatccaagtggcgtcctcagattaatcagtatttagatgagcagcttcaagcgtgttctgaccaatcaaccctgactgacgccatgcgttattcggtactagcaggtggcaaacggttacggccgttattgacgttagccattttagatacttttgatatcacaacgacggctgcaaacttgcgggcaagtgtggccgttgagttgatgcatacttattcgctaattcacgatgatttaccggcgatggataatgatcagctacgacgtggcgaaccgactaaccatgttaagtttggggaagacgttgccattcttgcaggggatgctttacaaccgttgactttcgaatggattgcggatagtgggttaccggcatcgatcgtcgctaatcaaaccttagcattagcgcaggccaccggacctcgcgggatggtggctggtcaagttgctgatgtccttggagcgggacaacatctggctttgccagccttacaacagctgcatcgcgagaagacgggggcgttaattcactacgctgtccaggcagggttgattcaagctcaagtgcaaccaaccgtgcaggaattgctattacaatatgctgatgcctatggattggcgtttcaaatttacgatgatattttagacgtgacgagtacgcctgctcagttaggaaaagctacgcataaggatgccgatgagcataagaatacgtatccaggtttgctggggcttgcaggcgcacgaacagcgttagaacaagcggtaacagctgctcaaacggcgttagtaaaagctagtgctgctagtcaacgaggcatgggcttgcttgcagcttttctaacgtattttacagattaa

SEQ ID NO: 6136 - protein, 296 aa, Lactobacillus plantarum WCFS1
MNKQLLTEFESKWRPQINQYLDEQLQACSDQSTLTDAMRYSVLAGGKRLRPLLTLAILDTFDITTTAANLRASVAVELMHTYSLIHDDLPAMDNDQLRRGEPTNHVKFGEDVAILAGDALQPLTFEWIADSGLPASIVANQTLALAQATGPRGMVAGQVADVLGAGQHLALPALQQLHREKTGALIHYAVQAGLIQAQVQPTVQELLLQYADAYGLAFQIYDDILDVTSTPAQLGKATHKDADEHKNTYPGLLGLAGARTALEQAVTAAQTALVKASAASQRGMGLLAAFLTYFTD

SEQ ID NO: 6137 - DNA, 873 bp, Streptococcus pyogenes SSI-1
  CDS (1)..(873): transl_table=11
atggacaaattagctagaattgacgaagccattcgtcgctactataagacgactagtaacggtgtatctgaagagttgattgatgctatcttgtattctgttgacagtggtggcaagcgcattcgaccacttatcttattagagatgattgagggatttggggtatcgttacagaatgctcattttgatttggctgcagcccttgaaatgattcatacaggaagtctgattcacgatgatttgccagccatggataatgatgattaccgacgtggtagactgaccaatcacaaacaatttggagaagccacggccattttggcgggagatagcttatttttagacccctttgggttaatagctcaagctgaattaaatagcgaggttaaagtagccttaatccaagaactttccctagcttcaggaacttttggcatggttggtggtcagatgctagatatgaaaggggaaaatcaagctttgagtctccctcagttgtcactgattcacctcaataaaaccggaaaattattaacttttccttttaaagcagcagctcttgtaacagaccaggctattactgttcgtcaacaactagagcaggcgggaatgctcatcgggcacgcctttcagattagggatgatattttagacgtgacagctagctttgaagatcttggaaaaacgcctaaaaaggatttatttgcagaaaaagctacttacccaagtttactggggttagaagcctcctaccaactgttgacagagagtttagatcaggctttgacgatttttcagacactagaaaacgatgtaggctttaagcctcaaataattacaaaactgatagaagggttacgacttaatgcctaa

SEQ ID NO: 6138 - protein, 290 aa, Streptococcus pyogenes SSI-1
MDKLARIDEAIRRYYKTTSNGVSEELIDAILYSVDSGGKRIRPLILLEMIEGFGVSLQNAHFDLAAALEMIHTGSLIHDDLPAMDNDDYRRGRLTNHKQFGEATAILAGDSLFLDPFGLIAQAELNSEVKVALIQELSLASGTFGMVGGQMLDMKGENQALSLPQLSLIHLNKTGKLLTFPFKAAALVTDQAITVRQQLEQAGMLIGHAFQIRDDILDVTASFEDLGKTPKKDLFAEKATYPSLLGLEASYQLLTESLDQALTIFQTLENDVGFKPQIITKLIEGLRLNA

SEQ ID NO: 6139 - DNA, 900 bp, Salmonella enterica subsp. enterica serovar Typhi Ty2
  CDS (1)..(900): transl_table=11
atggactttacgcagcagctacaggcttgcgtaacgcaagcgaatcaggcgctgagccgttttatcgcgccactgccctttcagaacactcccgtggtcgaagccatgcagtatggcgcattattaggcggtaaacgcctgcggccatttctggtttacgccaccggtcaaatgtttggcgtcagtacggcaacgctggatgcgccagctgcggcggtcgaatgcattcatgcctattcgctgatccatgacgacctgccagcaatggacgatgacgatttgcgtcgcggcctgccgacttgccatattaaatttggcgaagccaacgcaatcctggcgggagacgcgttgcaaacgctggcgtttaccattatcagcgacgcgccgatgccggaagtcgccgatcgcgatcgtatcgcgatgatcgccgaactggcaaacgccagcggtatcgccggtatgtgcggcggtcaggcattggatctggcggcagaaggccagcggatcactctggacgcgctggaacgcattcatcgccataagaccggcgcgctcattcgcgccgccgttagacttggcgcgttgagcgcgggcgataaaggacggaatactctgccgatacttgaccgctatgcagagagtatcggccttgccttccaggttcaggatgacattctggatgtggtgggcgatactgcaacgttaggtaaacgtcagggcgcagaccagcagcttggcaaaagtacctaccctgcacttctgggtcttgagcaagcccggaataaagcccgggacctgatagaggacgcccgtcagtcgttacatcagctggccgcgcaatcactggacacctcggcactggaagcgctagcgaactacataatccagcgtgataaataa

SEQ ID NO: 6140 - protein, 299 aa, Salmonella enterica subsp. enterica serovar Typhi Ty2
MDFTQQLQACVTQANQALSRFIAPLPFQNTPVVEAMQYGALLGGKRLRPFLVYATGQMFGVSTATLDAPAAAVECIHAYSLIHDDLPAMDDDDLRRGLPTCHIKFGEANAILAGDALQTLAFTIISDAPMPEVADRDRIAMIAELANASGIAGMCGGQALDLAAEGQRITLDALERIHRHKTGALIRAAVRLGALSAGDKGRNTLPILDRYAESIGLAFQVQDDILDVVGDTATLGKRQGADQQLGKSTYPALLGLEQARNKARDLIEDARQSLHQLAAQSLDTSALEALANYIIQRDK

SEQ ID NO: 6141 - DNA, 882 bp, Enterococcus faecalis V583
  CDS (1)..(882): transl_table=11
atgacgaattttagtcaacagcatttaccgttggttgaaaaagtcatggtcgattttatcgcagaatatactgaaaatgagcgtttgaaagaagcaatgctctactcaatacacgcaggtggcaaacgattacgcccgctattagtgttaacaacagtggccgcttttcaaaaagagatggaaacacaagactatcaagtggctgcctctttagagatgattcatacgtattcattaattcatgatgatttaccagcaatggacgatgatgatttacgtcgtggcaaaccaaccaatcataaagtgtttggtgaagcgactgccattttagcaggggacggcttattaacaggtgcatttcagttgctttctttgagtcaattaggcttaagtgaaaaagttttactgatgcaacaactggcaaaggcagcggggaatcaaggcatggtttccggccaaatgggtgatattgaaggagaaaaagtcagcttgactttagaagagttagcggctgttcatgaaaagaaaaccggagcgctaattgaattcgccttaattgctgggggcgtattagccaatcaaacagaagaagtcattggtttactgacacagtttgcgcatcactatggcttggcttttcaaattcgtgatgacttattagatgccacaagtacagaagcagatttaggtaaaaaagtaggccgagatgaagcgttgaataaaagtacgtatccagctcttctagggattgctggcgcgaaagatgcgctaacacatcaattagcagaaggtagcgctgttttagaaaaaatcaaagcaaatgttcccaacttttcagaagaacatttagcaaacttgttaactcagttacaattgagatag

SEQ ID NO: 6142 - protein, 293 aa, Enterococcus faecalis V583
MTNFSQQHLPLVEKVMVDFIAEYTENERLKEAMLYSIHAGGKRLRPLLVLTTVAAFQKEMETQDYQVAASLEMIHTYSLIHDDLPAMDDDDLRRGKPTNHKVFGEATAILAGDGLLTGAFQLLSLSQLGLSEKVLLMQQLAKAAGNQGMVSGQMGDIEGEKVSLTLEELAAVHEKKTGALIEFALIAGGVLANQTEEVIGLLTQFAHHYGLAFQIRDDLLDATSTEADLGKKVGRDEALNKSTYPALLGIAGAKDALTHQLAEGSAVLEKIKANVPNFSEEHLANLLTQLQLR

SEQ ID NO: 6143 - DNA, 882 bp, Chlamydophila caviae GPIC
  CDS (1)..(882): transl_table=11
atggtcgttatgaacatgttcgaaacttatcgaataatgatagaagctggtattgagtcctctttagaagaatttggttctaaagggttatcggtacgcgcacctgtagagtatgctctaacaagcggcggaaaacgcattcgtcctatgttagtttgtatgattgctaaaggtctggatatgagcagagatgttttagacgccgccttagctatagaatttatacatacatctactttaatagctgatgatcttccttgtatggatgatgatgacgagcgtcgtggacgccctacagtacataaagcttttgatgaggcttcagctttattagcatcttatgctttgattcctgctgcatattctcgcattcgtttaaatgcgaaaaaactcaaatctcagggtgtagatcctaaagaagtcgatattgcttacgatatcatttctgatgttacggataagaattttggtgttaacggagttttgggaggacagtatgaagatatgttctttaaaaatgacggtcctgagtatgtccaatctatcatcaataaaaaaacaggcgctcttttcgaaatagcgtgtgtctctggttggttatttggaggcggtgatcctttatgcgttcctcaaataatcgaattttctcaaacttttggtcttctttttcaaatgaaagatgatattttagacatccaccaagacggtcaagatgtggggctaaattacgctttgttatttggtttagacgctgctaaagatcttttaaactcttctatggataagtgcatgatcttattaaagcatcttaaacaacatgggttgaaggacacttcagaattagaaatgcttatagaatatatgggtattcgagattattaa

SEQ ID NO: 6144 - protein, 293 aa, Chlamydophila caviae GPIC
MVVMNMFETYRIMIEAGIESSLEEFGSKGLSVRAPVEYALTSGGKRIRPMLVCMIAKGLDMSRDVLDAALAIEFIHTSTLIADDLPCMDDDDERRGRPTVHKAFDEASALLASYALIPAAYSRIRLNAKKLKSQGVDPKEVDIAYDIISDVTDKNFGVNGVLGGQYEDMFFKNDGPEYVQSIINKKTGALFEIACVSGWLFGGGDPLCVPQIIEFSQTFGLLFQMKDDILDIHQDGQDVGLNYALLFGLDAAKDLLNSSMDKCMILLKHLKQHGLKDTSELEMLIEYMGIRDY

SEQ ID NO: 6145 - DNA, 1320 bp, Streptomyces rochei
  CDS (1)..(1320): transl_table=11
atgcgtcccacccacgcgaaggaccaccctgtggcctcgccgccgcggccggtcgcggcaacggtggcccagctcccgcgcggcccggtggccggcgacggcgcggggcagggaagggccgaggcgtgcgccacggcgggcggcccgtttccggccggtcccgccgaggtgcggctgatcgacgccgacgtgccgggcgccgtcggccgggtgctcgacgaggcactggcggagcgcctgcgccgcgcgcggacggcggatccactgttcgcacgggacgtggccgaacggatgacgcggttcacccttgagggtggaaagcgcacccgcgcacagttggcgtggtgggcctcgcgggcctgcgccggccgggacgcggccgtcgcggccgcggccctgcaaatcggcgccgccctggaactgctccagacgtgcgcgctcgtccacgacgatgtgatggaccgggccacgctgcgacggggacggcccacgctgcacacagagctggcctcgggccacgaggaccgggtgggccccgagcgggcccggcggttcgggcagtcggcagcggttctcgccggggacctggctctggcctgggccgacgatctggtggcggagacgccgctggcagtgtggaaggccgtggtggtgcgccggctgtggagcgacatgcgcacggagatggtggcgggccagtacctggacctgcacggtcaggccacagcggcacggagcctggcccgcgcgctgcgcgccgcctgcctgaagagcgccctgtactcggtcgagcggcccctggccctgggggcggccgtggccggcgcggacgatgtgacgctgcgccggctgtgcgacgccggacgctgtgccgggatggcgttccagctccgcgacgacctggacgacgtcttcggggatccgctggagacgggcaaggcgagcggcggcgacatccgggagggcaagtcgacctatctggtcgcggtcgcccgcgcccgggccgaggccgccggcgacggcaccgccctcgccgtgctggaccggtggctcggtgacacggccctcaccgagcgcggactggacgaggtgcgggaggtgctcgtggcgacgggcgcgcgcgccaccgtggagaccaagctggaccggctcgccgcgcaggggctgcggcacttcgacggcgccctgctcgacccggaaggcgcggcgccgttgcgggctctgctgctcgcggcggccggggtgctccccggcctagaagccgcctcgcggggccggtacgcgccccttccccgggacggcgcggagagcggcctgtga

SEQ ID NO: 6146 - protein, 439 aa, Streptomyces rochei
MRPTHAKDHPVASPPRPVAATVAQLPRGPVAGDGAGQGRAEACATAGGPFPAGPAEVRLIDADVPGAVGRVLDEALAERLRRARTADPLFARDVAERMTRFTLEGGKRTRAQLAWWASRACAGRDAAVAAAALQIGAALELLQTCALVHDDVMDRATLRRGRPTLHTELASGHEDRVGPERARRFGQSAAVLAGDLALAWADDLVAETPLAVWKAVVVRRLWSDMRTEMVAGQYLDLHGQATAARSLARALRAACLKSALYSVERPLALGAAVAGADDVTLRRLCDAGRCAGMAFQLRDDLDDVFGDPLETGKASGGDIREGKSTYLVAVARARAEAAGDGTALAVLDRWLGDTALTERGLDEVREVLVATGARATVETKLDRLAAQGLRHFDGALLDPEGAAPLRALLLAAAGVLPGLEAASRGRYAPLPRDGAESGL

SEQ ID NO: 6147 - DNA, 954 bp, Rhodopirellula baltica SH 1
  CDS (1)..(954): transl_table=11
gtgagcgtgcaagcgtcgggggatcgtcgtgaacaaccgatcgattccaatgaatcattgaaggactacatggacgctcgccgaccggcggtggaagcggcattgcaagctgcgtgcgaagaccggccgggtgtccccgagcgtctggccgcggcgattcgatacgcggtactggcgcccggcaaacggctccgtccgatgctgacgatcatggccgcggaagcttgcggtggcgatgcggaatcggcaatgccgtcggctgtcgcggtcgaaatgattcatgcttattcgttgattcacgatgacttgccagcgatggatgacgacgatttgcggcgtggtcgaccgacgacgcacatcgaattcgacgaagcgacggcaatcttggctggcgatgccctgcaatcgatggcatttgctcacctgcaccacagcacatcggacgccaccaaatcagccgctctgatcggcacattggcgaccgccgccggaccggccgggttggtcgggggccaagcggacgacttggatgccgagaagtacaccgtcgaggacttcgggggggcggatgctgccctcaaacacctcgaagcaatccaccaccgcaaaacgggggctctgtttacagcctgtgcggcgatgggcgcaatttccgccggagcggatactaatgctgtttcggccttgaccgattacgctaaagcgtttggactcgcgtttcaaatcacggatgatttacttgattgcacgtccacggatgagcgacttggtaaacgaacgggcaaagacgacggccgtggcaagctgacttacccggggttgatgggtctggaccgggcgagagcccacgcggaaagcaccatccacatggcgcacgaatcgttgcagttgttcggaacagctggccagcggttaagaaaactggcggactttgtcttggagcgtacgaattga

SEQ ID NO: 6148 - protein, 317 aa, Rhodopirellula baltica SH 1
MSVQASGDRREQPIDSNESLKDYMDARRPAVEAALQAACEDRPGVPERLAAAIRYAVLAPGKRLRPMLTIMAAEACGGDAESAMPSAVAVEMIHAYSLIHDDLPAMDDDDLRRGRPTTHIEFDEATAILAGDALQSMAFAHLHHSTSDATKSAALIGTLATAAGPAGLVGGQADDLDAEKYTVEDFGGADAALKHLEAIHHRKTGALFTACAAMGAISAGADTNAVSALTDYAKAFGLAFQITDDLLDCTSTDERLGKRTGKDDGRGKLTYPGLMGLDRARAHAESTIHMAHESLQLFGTAGQRLRKLADFVLERTN

SEQ ID NO: 6149 - DNA, 903 bp, Wigglesworthia glossinidia endosymbiont of Glossina brevipalpis
  CDS (1)..(903): transl_table=11
atgaataattttttattatctttaacaaagattcagaatcatattaatttaattttaaaaaaatatttaaatattttttctaaaaaaaatatgaatttaactttagctatgaaatacgcattattaaatggcggtaagagattgagagcatttctagtatattgcataggaaaaatgcttaacgtttcttcaaataatttagattgtatagcggcttcaatagaatgcattcatgcatattcattaattcatgacgatttgccatctatggataatgatagatttcgtagaggtcgtgaatcttgtcatgtaaaatttaatgaatacatcgctatattagctggagattcattgcaatctttagcttttaatatattatctactgtaaatatgccagatgtatctgtaaataatagaatgaaaatgatttctatactttcatatgcatctggagctaaaggaatgtgtttaggacaatctttagatttagaaaatcaaggatcattgatatctattaaacaattggaagaaatttataaatacaaaacaagctttttaatttatgctgcaactagaatgacaatactatctagtaatataaaaaataaaaaaatattaataaatttaataaaatattctaaatcaataggtttagcgtttcaaattcaagatgatattttaaatgtaattggatcaaaaaaaattactggaaaatgtcaaggatcggataaaaaattaaataaaaatacttattcaagtttaattggaataaaattatctaaagaaaaagcatttaatttatataaaaaatcattatcttatttagaatatattaatgaattaggttataatactgaatcactaataaaattagcgcattatattataataagaaataagtaa

SEQ ID NO: 6150 - protein, 300 aa, Wigglesworthia glossinidia endosymbiont of Glossina brevipalpis
MNNFLLSLTKIQNHINLILKKYLNIFSKKNMNLTLAMKYALLNGGKRLRAFLVYCIGKMLNVSSNNLDCIAASIECIHAYSLIHDDLPSMDNDRFRRGRESCHVKFNEYIAILAGDSLQSLAFNILSTVNMPDVSVNNRMKMISILSYASGAKGMCLGQSLDLENQGSLISIKQLEEIYKYKTSFLIYAATRMTILSSNIKNKKILINLIKYSKSIGLAFQIQDDILNVIGSKKITGKCQGSDKKLNKNTYSSLIGIKLSKEKAFNLYKKSLSYLEYINELGYNTESLIKLAHYIIIRNK

SEQ ID NO: 6151 - DNA, 912 bp, Bordetella pertussis Tohama I
  CDS (1)..(912): transl_table=11
atgaagcaaagtcatctcgcctgcgccgactggctgcgggaacgcgcgcagcatgtcgagcacgtgctcgacgaattgctgcctggcgccgatatcgctcccacgcggctgcacgaagccatgcgctatgcggtgctgggcggcggcaagcgggtgcgcgcggccctggtctacgcggccgggcaggcctgccccgtcaacggcagcacgctggccgtcggggcgtcgatggaccgcgccgccgcggccgtcgagctgatccacgcctattcgctggtgcacgacgacctgccgtgcatggacgacgacacgctgcgccgcggccggcccacggtgcatgtgcaattcgacgaggccacggccatgctggccggcgatgccctgcagcctctggccttcgaactgctggccggcatgccgatcgcgcccgcgctggtggtgcaggccgcccaggtcctggcgcgcgccgccggcagccagggcatggccggcgggcaggccatcgacctgcacagcgtgggccgcatgctcacgcgcgacgaactgcagaccatgcacagcatgaagaccggcgccatgctggcgtgcagcgtgacgctgggaggcatcgtggccggcgccagctcgaccgcgcgccaggcgctcgacagctacgcgcaggcgatcggcctggcgttccaggtcgtcgacgatatcctcgatgtgacggccgacaccgccagcctgggcaagacggccggcaaggatgcggccgacaacaagccgacctatgtatccttgctgggcctggagcaggcccgcgcgctggcgcaggagttgcgccaggcggcccaccaggctctggcgccgctgggcgagtccggcgcgcggctgggccaactggcagatttcatcgtactcagagaccgctga

SEQ ID NO: 6152 - protein, 303 aa, Bordetella pertussis Tohama I
MKQSHLACADWLRERAQHVEHVLDELLPGADIAPTRLHEAMRYAVLGGGKRVRAALVYAAGQACPVNGSTLAVGASMDRAAAAVELIHAYSLVHDDLPCMDDDTLRRGRPTVHVQFDEATAMLAGDALQPLAFELLAGMPIAPALVVQAAQVLARAAGSQGMAGGQAIDLHSVGRMLTRDELQTMHSMKTGAMLACSVTLGGIVAGASSTARQALDSYAQAIGLAFQVVDDILDVTADTASLGKTAGKDAADNKPTYVSLLGLEQARALAQELRQAAHQALAPLGESGARLGQLADFIVLRDR

SEQ ID NO: 6153 - DNA, 912 bp, Bordetella parapertussis 12822
  CDS (1)..(912): transl_table=11
atgaagcaaagtcatctcgcctgcgccgactggctgcgggaacgcgcgcagcatgtcgagcacgtgctcgacgaattgctgcctggcgccgatatcgctcccacgcggctgcacgaagccatgcgctatgcggtgctgggcggcggcaagcgggtgcgcgcggtcctggtctacgcggccgggcaggcctgccccgtcaacggcagcacgctggccgtcggggcgtcgatggaccgcgccgccgcggccgtcgaactgatccacgcctattcgctggtgcacgacgacctgccgtgcatggacgacgacacgctgcgccgcggccggcccacggtgcatgtgcaattcgacgaggccacggccatgctggccggcgatgccctgcagccgctggccttcgaactgctggccggcatgccgatcgcgcccgcgctggtggtgcaggccgcccaggtcctggcgcgcgccgccggcagccagggcatggccggcgggcaggccatcgacctgcacagcgtgggccgcatgctcacgcgcgacgaactgcagaccatgcacagcatgaagaccggcgccatgctggcgtgcagcgtgacgctggggggcatcgtggccggcgccagctcgaccgcgcgccaggcgctcgacagctacgcgcaggcgatcggcctggcgttccaggtcgtcgacgatatcctcgatgtgacggccgacaccgccagcctgggcaagacggccggcaaggatgcggccgacaacaagccgacctatgtatccttgctgggcctggaccaggcccgcgcgctggcgcaggagttgcgccaggcggcccaccaggccctggcgccgctgggcgagtccggcgcgcggctgggccaactggcagatttcatcgtactcagagaccgctga

SEQ ID NO: 6154 - protein, 303 aa, Bordetella parapertussis 12822
MKQSHLACADWLRERAQHVEHVLDELLPGADIAPTRLHEAMRYAVLGGGKRVRAVLVYAAGQACPVNGSTLAVGASMDRAAAAVELIHAYSLVHDDLPCMDDDTLRRGRPTVHVQFDEATAMLAGDALQPLAFELLAGMPIAPALVVQAAQVLARAAGSQGMAGGQAIDLHSVGRMLTRDELQTMHSMKTGAMLACSVTLGGIVAGASSTARQALDSYAQAIGLAFQVVDDILDVTADTASLGKTAGKDAADNKPTYVSLLGLDQARALAQELRQAAHQALAPLGESGARLGQLADFIVLRDR

SEQ ID NO: 6155 - DNA, 921 bp, Prochlorococcus marinus str. MIT 9313
  CDS (1)..(921): transl_table=11
atgaacgagacaaggttcatggcggcggcggtcagcaccttcttcgacttccctgcttatttggctgcggccaaagccagcgttgaagaggcattggatgattcgcttggccctgagcgccctgagcaactcagggaggccatgcgctactcccttttggcgggtggtaagcgtttacgccccatcctttgcctagcagcttgcgaacttgctggaggtgaaccggcagaggctctgccgacagcagtggctttggaaatgattcacacgatgtcgctgattcatgacgatctccccgccatggataacgacgatttacgccgcggtcgtcccaccaatcacaaggtttatggcgatgctgttgccattctcgcgggtgatgcgctgcttacacgttctttcgagatggttgccttgcgcagtccgggagtacccccagagcggctgttgaaggttgttggcgagctttctctcgttgctggtgctcctggtttggtgggggggcaggttgtggatctggagtgtgagggcaaagaggtggatctggagactttggagttcattcatctccataagaccggggccttgttgagtgcttgtgtgatctgcggagcattgattggtggagcagaagacgatttgattgatgcactacgcatctatgcgagagggattggtttggcgtttcagatcattgatgacatccttgatgtgacagcgagcagtgatgttcttggcaaaactgctggcaaggatctgcttgctgataagaccacctatcccaaattgttgggtttagacgaatcccgccggcgagcagaactccttgtgagcgaagccaaggcagcactagagccttggcaagcttctgctgcacctttgctggcactagccgattacatcaccagccgcgatcgatga

SEQ ID NO: 6156 - protein, 306 aa, Prochlorococcus marinus str. MIT 9313
MNETRFMAAAVSTFFDFPAYLAAAKASVEEALDDSLGPERPEQLREAMRYSLLAGGKRLRPILCLAACELAGGEPAEALPTAVALEMIHTMSLIHDDLPAMDNDDLRRGRPTNHKVYGDAVAILAGDALLTRSFEMVALRSPGVPPERLLKVVGELSLVAGAPGLVGGQVVDLECEGKEVDLETLEFIHLHKTGALLSACVICGALIGGAEDDLIDALRIYARGIGLAFQIIDDILDVTASSDVLGKTAGKDLLADKTTYPKLLGLDESRRRAELLVSEAKAALEPWQASAAPLLALADYITSRDR

SEQ ID NO: 6157 - DNA, 897 bp, Chromobacterium violaceum ATCC 12472
  CDS (1)..(897): transl_table=11
atggccaatgaaagcttcatcggctggatgacctccatccagcaatacatggaacaggcgctggaaaagttgctgccgtcggctgactgcgccccgcaacggctccatgaagcgatgcgctacgcgacgctggagggcggcaagcgcgtgcgcccgctgctggtgttcgccgccggcgagctggtcggcgcgcaagcggacaatctggcccgcatcggcgcggcgctggaaatggtccatgcttactcgctggtccacgacgacatgccctgcatggacaacgacgtgctgcgccgcggcaagcccacctgtcacatcgcctacgatgacgccaccgcgctcctggtcggcgacgcgctgcagacccgcgccttcgagctgatctcccagcccatgccggacatcgcgccggccagccagctggaaatggtccgcgcgctggcccacgccgccggccacgccggcatggcgggcggccaggcgatagacctggccagcgtcggcctgccgctgacgctgccggagctggaattcatgcacatgctgaagaccggcgcgctgatccgcgccgcggtgttggcgggttccatggcgggccgcgagctgtccgccgcagagaaggaggcgctcgacgccttcgccaagcgcatcggcctggccttccaggtggtggacgacattctggactgcgaggcggacaccgcgacgctgggcaagaccgccggcaaggacgccgccaacgacaaacccacctacgtcagcctgctgggcctcgccgaagccaagcggatggcgaaggatttgcacgaccaggccttcgccgcgctggagggcttcggcccgcaggccgaccgcctgaaacaactggccgactacatcgtcgcccgctcgttttga

SEQ ID NO: 6158 - protein, 298 aa, Chromobacterium violaceum ATCC 12472
MANESFIGWMTSIQQYMEQALEKLLPSADCAPQRLHEAMRYATLEGGKRVRPLLVFAAGELVGAQADNLARIGAALEMVHAYSLVHDDMPCMDNDVLRRGKPTCHIAYDDATALLVGDALQTRAFELISQPMPDIAPASQLEMVRALAHAAGHAGMAGGQAIDLASVGLPLTLPELEFMHMLKTGALIRAAVLAGSMAGRELSAAEKEALDAFAKRIGLAFQVVDDILDCEADTATLGKTAGKDAANDKPTYVSLLGLAEAKRMAKDLHDQAFAALEGFGPQADRLKQLADYIVARSF

SEQ ID NO: 6159 - DNA, 888 bp, Gloeobacter violaceus PCC 7421
  CDS (1)..(888): transl_table=11
atgtcacagttcgacctcgacgcttacctgcgccagtgccgctcgcaggtggaagccgccctcgaccgctatttgccccagcagtacccggacaagctctacgaagcgatgcgctattcgctgctggcgggaggcaagcgcctgcggccgattttgtgcctgaccagctgccggatgtccggcggcagtgcggatttggcgatgcccaccgcctgcgccttggagatggtgcacaccatgtcgctcatccacgacgacctgcccgccatggacgacgacgactaccgccggggcaagctcaccaaccacaaagtctacggcgaggacatggccatcctggcgggcgacgccctgctcgcctacgcctttcaactgatcgccgagaaaaccgtgggggcgcagcccgagcgcgtcgtcgaggtgctcggccgtctgggcaaagcggcgagcggcgccggtctggtgggaggccaggtggtcgatctcgaatcggaaggccggacaatcaccctcgaaaccctcgaatacatccacacccacaagaccggtgccttgctcgaggtctcggtgatctccggcgccatcctggccggggccgacggcggggtcgtcgagcggttgacccgctacagccgctgcatcggactggccttccaaatccgcgacgatctgctcgacatcaccgccacccaggctgaactgggcaagaccgccggtaaggacttgcgcgaccgcaaggcgacctacccgagcctgctgggctacgacggcgcgcgcgaccgcgccgagcagttgcgggagcaggcggtggcggaactggcggattttggggcatcggcgcgaccgctgaccgcccttgccgaatttatcgtgcaacggcgccattaa

SEQ ID NO: 6160 - protein, 295 aa, Gloeobacter violaceus PCC 7421
MSQFDLDAYLRQCRSQVEAALDRYLPQQYPDKLYEAMRYSLLAGGKRLRPILCLTSCRMSGGSADLAMPTACALEMVHTMSLIHDDLPAMDDDDYRRGKLTNHKVYGEDMAILAGDALLAYAFQLIAEKTVGAQPERVVEVLGRLGKAASGAGLVGGQVVDLESEGRTITLETLEYIHTHKTGALLEVSVISGAILAGADGGVVERLTRYSRCIGLAFQIRDDLLDITATQAELGKTAGKDLRDRKATYPSLLGYDGARDRAEQLREQAVAELADFGASARPLTALAEFIVQRRH

SEQ ID NO: 6161 - DNA, 918 bp, Photorhabdus luminescens subsp. laumondii TTO1
  CDS (1)..(918): transl_table=11
atgtctgaacaaaattcaacccaatttaaagaacagcttaaaatctgtcaacaacgagtcaataacgttctgataagcacactatcttcagtggcatttgcaaacaacccactagttcatgcaatgcaacatggtactttactcggtggtaaacgcctgcgcccatttttagtttatgccgttggtgaaatgtttggattatccgcaaataatctggatgctccagcagcagccgttgaatgtatccacgccttttcattaattcatgacgatttaccggcgatggataacgatgatttacgccgtggacaaccaacctgccacataaaatttggtgaagctcacgcgattctagcgggagatgcattacaggctctggcgtttgaaatcctatctaaaagagaaatgccggatgttacaacagcagatcgccttgaaatggttgctgaattggcaaccgccagtggtatagccggtatgtgtggtggccaagccctagacttggccgctgaaggcagacacattgatctccatatgctggaacaaattcatcgccataaaacaggtgcgcttattcgttgcgccgtcagaatgggcgcatatggtgcaggccaaagtgggcatgacgccctgcctgaattggatcaatatgcccaagcgattggtctcgcattccaagttcaggacgatattcttgatgtcattggcgataccgaaatgataggaaaacgtcaaggcagtgaccaacagctaggaaaaagcacttaccccgcattactagggttagaacaagcacagaaaaaagcatacgaactgtatcaagaagccttaaaagctttgaataaactggaagataaatcctataacacaacaatgctgcgcgcacttgccagctttattattgaacgtaataactaa

SEQ ID NO: 6162 - protein, 305 aa, Photorhabdus luminescens subsp. laumondii TTO1
MSEQNSTQFKEQLKICQQRVNNVLISTLSSVAFANNPLVHAMQHGTLLGGKRLRPFLVYAVGEMFGLSANNLDAPAAAVECIHAFSLIHDDLPAMDNDDLRRGQPTCHIKFGEAHAILAGDALQALAFEILSKREMPDVTTADRLEMVAELATASGIAGMCGGQALDLAAEGRHIDLHMLEQIHRHKTGALIRCAVRMGAYGAGQSGHDALPELDQYAQAIGLAFQVQDDILDVIGDTEMIGKRQGSDQQLGKSTYPALLGLEQAQKKAYELYQEALKALNKLEDKSYNTTMLRALASFIIERNN

SEQ ID NO: 6163 - DNA, 927 bp, Rhodopseudomonas palustris CGA009
  CDS (1)..(927): transl_table=11
atggccaccggcacttccacgatcgactttgccaagcggctcgacactaccgccgaggaaaccgaagcgctgctcggccggctgttgtccgacgaattgatgtccgacgagatcgcccggccgcgccggctgatggacgcgatccgctactccacgctcggcggcggcaagcggctgcggccgttcctggcggtcgagagcgccgcagtgttcggcatcgatcgtgccgccgcgctcttggtcggcgccgcgctggagtgcatccactgctactcgctgatccacgacgacctgccttcgatggacaacagcgatctgcgccgcggccgtccgacgctgcacaaggcctatgacgacgccactgcgatcctcgccggcgacgcgctgctgaccttcgcgttcgacatcgtcacccgcgacgaagtgcacaacgatccgacggtgcggctgctgctgacacgagtgctggcgcgctgcgccgggctcggcggcatggtcggcggccagatgcttgatcttgccggcgaaggccggttcggcgaccgcgagccggtcgacgtcgcgcggctgcagcagatgaagaccggcgccctgctccgctacggctgcgtcgccggcgcgatcctcggccaggcaagccccgaccagtatcgcgcgctcgacgattacggccgcgcactcggtgaagcgttccagattgccgacgacctgctcgatgtcgaaggcgacgctgccgcgctcggcaagccggccggcgccgatgccgcgctcggcaagaccaccttcgtcacccaactcggcatcgacggcgccaagcagcggctgcgcgacctggtcgcgcgtgccgaccaggcgctggcgccgttcggcgagcgcggcgaggtgctgcgcgccgccgcccgcttcgtcgccgagcggaagagctga

SEQ ID NO: 6164 - protein, 308 aa, Rhodopseudomonas palustris CGA009
MATGTSTIDFAKRLDTTAEETEALLGRLLSDELMSDEIARPRRLMDAIRYSTLGGGKRLRPFLAVESAAVFGIDRAAALLVGAALECIHCYSLIHDDLPSMDNSDLRRGRPTLHKAYDDATAILAGDALLTFAFDIVTRDEVHNDPTVRLLLTRVLARCAGLGGMVGGQMLDLAGEGRFGDREPVDVARLQQMKTGALLRYGCVAGAILGQASPDQYRALDDYGRALGEAFQIADDLLDVEGDAAALGKPAGADAALGKTTFVTQLGIDGAKQRLRDLVARADQALAPFGERGEVLRAAARFVAERKS

SEQ ID NO: 6165 - DNA, 870 bp, Bdellovibrio bacteriovorus HD100
  CDS (1)..(870): transl_table=11
ttggatctcgcaattcagattgatcaggaaatcgccgcgcgcacccaggctgtgaaccagtttgtggaaaaatatctgtctgacatggagctaccagcaggcagcgccatttctgagttgcgaaagtccatgctttattccgccaccaatggcgggaaacgtttccgtccggttctgtccttgctggtcggtgagttgttcggtgctggtaaagagcgcatcttgcctttcgccgctgccgtggaaatgattcatacgtactctttgattcatgatgatctgccatgcatggataacgatgacatgcgccgcgggaagcccaccaatcacaaagtgttcggtgaagactttgcgttgctggccggggacgctcttttgactgaagctttcatgctgattgcggaaaactatggggataacagcttcctggtgggtcacctgacaaggctgttatcttcggcggcaggaattcgaggcatggtcggtggtcaggcgattgacctgcgtgctggtgacaaacaaatgtcactggaagaactgacccatctgcatcgtcttaaaaccggtgcgttgattcgtgtggcggttgagggtgcggctgtgattgccggggcaaagccgactgaaattgaaagtcttaaaaaattcggcgaaggcctgggccttgctttccaagtggccgacgatgttctggatcacggcgaaaaaggtcaggatcttcgcagcttcaccggtatcctgggtcttgagggcacaaagacctatttgaaggatgtcagtgcttcgactttggcggaactgcacaaggtgtctgccgatgctccgcttttggagtatctgatcagctttaatcaaaaccgtcaggtgtaa

SEQ ID NO: 6166 - protein, 289 aa, Bdellovibrio bacteriovorus HD100
MDLAIQIDQEIAARTQAVNQFVEKYLSDMELPAGSAISELRKSMLYSATNGGKRFRPVLSLLVGELFGAGKERILPFAAAVEMIHTYSLIHDDLPCMDNDDMRRGKPTNHKVFGEDFALLAGDALLTEAFMLIAENYGDNSFLVGHLTRLLSSAAGIRGMVGGQAIDLRAGDKQMSLEELTHLHRLKTGALIRVAVEGAAVIAGAKPTEIESLKKFGEGLGLAFQVADDVLDHGEKGQDLRSFTGILGLEGTKTYLKDVSASTLAELHKVSADAPLLEYLISFNQNRQV

SEQ ID NO: 6167 - DNA, 1281 bp, Nasonia vitripennis
  CDS (1)..(1281)
atggcgtgtttaggctcgagtcggctctgcgcagcccgtgcggagaaattgtgccagttccggcgtaacatcgcctcctctgtcaactttcgtcgcgagctcgtcgatcagccgcagcagcagcatccatcagtgcagcaggctgcgccgatcagcggcagcatcgccagcaccaccggcagcagactgtttcagcgatctcagagctcgccgaggtacggaggacgcagctgtcgcacgacgagcatagcccgagcgataagctcgatgcagacgcagcagccgggatcgctgccggactaccgaatcgacccctaccagctcctcgaggatgatctcaagaacgtgtacgaggacataagaagggagttggtcgccaacacgagccacgaggagctgaggacgatagcgacgtactacttcggcggccagggtaaggcgctcagacccatggtcgcgatactcatggcgagagccatcaactacgacaaggatcagagcggtctcttggcctcgcagcggcaggttgcgatgatttccgagatgatccacaacgcctcgctggtgcacgacgacgtcgtcgaccagtcggactttcgccgaggaaagccttccgtcaacgcgctctggagccagaagaaggtgacaatggccggggacttcattctcgctgtggcttcgatgatgattgcgcgcctgcagaacgacgatgtcaccttaacactgagtcaggttatcaccgacttggtccagggcgagttcatgcagctcggctccaaggagacggagaacgagcgcttcgcccactatctcaccaagacctacaggaagacggccagcctcatcgccaattcggccaaagcggttgccatgctgggcggcgcggacgagcgactcgcggagctcgctttccaatacggaagaaacatcggcttggcttttcaactggtcgacgatctgctcgacttcgtgtcctcctcggacgcgatgggcaagccaacggctgccgacttgaagctgggcctcgccacggcgcccgtgctcttcgcctgcgaaagatttcccgagctcaaccccatgataatgcgtcgcttccaagagcccggcgacgtcgagaaggccttcgagctggtccacaagtcccagggcttggagcagacgagatttttggcgaaaaagcactgcgtcgaggccgtcaggctggcgcaaaccttggccgagagtccctaccagaagagcttgatggttgtcagcgacctggtcatcaatcgcatcaagtag

SEQ ID NO: 6168 - protein, 426 aa, Nasonia vitripennis
MACLGSSRLCAARAEKLCQFRRNIASSVNFRRELVDQPQQQHPSVQQAAPISGSIASTTGSRLFQRSQSSPRYGGRSCRTTSIARAISSMQTQQPGSLPDYRIDPYQLLEDDLKNVYEDIRRELVANTSHEELRTIATYYFGGQGKALRPMVAILMARAINYDKDQSGLLASQRQVAMISEMIHNASLVHDDVVDQSDFRRGKPSVNALWSQKKVTMAGDFILAVASMMIARLQNDDVTLTLSQVITDLVQGEFMQLGSKETENERFAHYLTKTYRKTASLIANSAKAVAMLGGADERLAELAFQYGRNIGLAFQLVDDLLDFVSSSDAMGKPTAADLKLGLATAPVLFACERFPELNPMIMRRFQEPGDVEKAFELVHKSQGLEQTRFLAKKHCVEAVRLAQTLAESPYQKSLMVVSDLVINRIK

SEQ ID NO: 6169 - DNA, 1341 bp, Tribolium castaneum
  CDS (1)..(1341)
atgccgagcctgtttgcgataggggaccaccgtctcacaacagtcttgacgatggcttctctaggctctggtagactctgtgctcgggtgcaggaaaaactgtgtcagtggggacaatcggctcaattcaggagggaagcgtcctcctgtgtgcggacaaaactcggattgcaaaccacccccaggatagtgaccaaggagcaccagaaccagcgacaatcacagactttggcggctgctgcggcacagagtgtgtcttcaggatgttggcatccttgcagcaggccggaagttgcagccacagcgcgcagtttcagcacgatgagaacgcagcaacctggttccctccccgaataccaagtggacccctatcaccttttagaagacgacctcaaggacgtttacgtgtatatccgagacgctttgcgaagaagcacttaccaagatgacctctacgagatagctacgtattatttcgatggacatgggaaagcaattagaccaatggtggctatcctcatggctagggcgataaattatcacatatataaagaaaaaagtggtcttttgacgtcgcaaagggaagtagcgatgatttcggaaatgatccacacagcctctctcgtccacgacgacgtcatcgatcagtcagatttccgtcgtggtaaacccagcgtcaacgtgatgtggaatcacaaaaaggtgaccatggctggagatttcatcttagcggttgcctcaatcatgatagctaggttaaaaaataacgacgtcactctagttcttagtcaagttgtctccgacttagttcagggagagttcatgcaactcggatctaaggaaacggaaaacgaacgatttgctcattatctaaccaaaacgtacagaaaaaccgcttctctgatagccaactctgtaaaatctgtgacaatgttagccggtgctgatgagcaactctccgacatttcgtaccaatacggacgcaatttaggtttagcgtttcagttagttgacgatcttctcgattttgtctcgagttctgcagccatgggaaagcccacagcggccgacctgaagctgggcctggccacagcgcccgtgctcttcgcttgcgaaaaattccctgaactgaacccgatgataatgcggcggttccaagagcctggggacgtggaaagggcgtttgacctcgtccacaaatcgcgagggctggagcagacgcagtatttggccaagcagcactgccaggaggccgtgaggcttgcaaaccttctggaggagagtccgtaccaaaaaggactgatagttgcggctgattatgtactaaaccgcatgaaatag

SEQ ID NO: 6170 - protein, 446 aa, Tribolium castaneum
MPSLFAIGDHRLTTVLTMASLGSGRLCARVQEKLCQWGQSAQFRREASSCVRTKLGLQTTPRIVTKEHQNQRQSQTLAAAAAQSVSSGCWHPCSRPEVAATARSFSTMRTQQPGSLPEYQVDPYHLLEDDLKDVYVYIRDALRRSTYQDDLYEIATYYFDGHGKAIRPMVAILMARAINYHIYKEKSGLLTSQREVAMISEMIHTASLVHDDVIDQSDFRRGKPSVNVMWNHKKVTMAGDFILAVASIMIARLKNNDVTLVLSQVVSDLVQGEFMQLGSKETENERFAHYLTKTYRKTASLIANSVKSVTMLAGADEQLSDISYQYGRNLGLAFQLVDDLLDFVSSSAAMGKPTAADLKLGLATAPVLFACEKFPELNPMIMRRFQEPGDVERAFDLVHKSRGLEQTQYLAKQHCQEAVRLANLLEESPYQKGLIVAADYVLNRMK

SEQ ID NO: 6171 - DNA, 888 bp, Clostridium thermocellum ATCC 27405
  CDS (1)..(888): transl_table=11
gtggaatttaaacagcaactggaaaaatatgcagatatagtaaatgaatatcttgacaggtgtattgttcaaaatgagcttcctgaaaagtctttgtacagcgcaatgagatacagtctcatggcgggaggaaagaggcttcggcccgttctttcccttgcggtatgcgatatgctgggaggaagtgttgaacaagtgcttccctttgcgtgcgccgttgagatgattcatacatattctctcatacatgatgatcttccggccatggacaatgacgatttcaggaggggcaggcccacaaatcacaaggtatatggcgaagcgttggcaatacttgcaggcgacggtcttttaaacctggcatttgagattatgctggagaatataataaaaaacggtgacatggagagaaagtcaaaagcggcggcagtaattgcgaaagccgcagggatgaacggcatgattgcgggacaggttattgatcttgagtcggaaggaaagcaagtggacaatgagattttaaatcgtatgcacagactgaaaaccggagcgctgataaaggcgccggtggtttcggcggccatattgtgcggagcggatgcggatgatattcaaaaacttgatgagtttgccgaaaaccttggtctggcctttcagataaaggatgacatattggatgtggaaggcagcagtgagaaacttggcaaaaaggttggcagcgatgccgataataacaaatccacatatgttaccgtttacggtttggaaaaatcaaaggaaatactttccgatgtcacgaaaaaggccgttgatgcccttgaaaagttcggggaaaaagcggattttttaagaagtcttgcgaaatatttgctggaaagggaaaattga

SEQ ID NO: 6172 - protein, 295 aa, Clostridium thermocellum ATCC 27405
MEFKQQLEKYADIVNEYLDRCIVQNELPEKSLYSAMRYSLMAGGKRLRPVLSLAVCDMLGGSVEQVLPFACAVEMIHTYSLIHDDLPAMDNDDFRRGRPTNHKVYGEALAILAGDGLLNLAFEIMLENIIKNGDMERKSKAAAVIAKAAGMNGMIAGQVIDLESEGKQVDNEILNRMHRLKTGALIKAPVVSAAILCGADADDIQKLDEFAENLGLAFQIKDDILDVEGSSEKLGKKVGSDADNNKSTYVTVYGLEKSKEILSDVTKKAVDALEKFGEKADFLRSLAKYLLEREN

SEQ ID NO: 6173 - DNA, 888 bp, Clostridium difficile 630
  CDS (1)..(888): transl_table=11
ttggaatttaaacaatgtctaaaagaaaaagcaagttttgtagaaaaagtacttaaagaatatatgcctaaagaagaagggtatcaaaaaactgttattgaagctatgaactatagcttaagtgctggaggtaaaagattaagaccaatacttacattggaggcttgtaaaatagttggaggtaatgaagatgaagctattccttttgctattgcaattgaaatgatacatacatattcactaatacatgatgatttgccagctcttgacaatgatgatttaagaagaggaagaccaacaaatcataaagtatatggagaagctatggggattttagcaggagatgctttgttaaactatgcttttgaagtaatgcttgcaggctcaatcaataaagaaaatccagaaaagtatctaaaagctataaatgaaattgccaaaggtgctggtatatatggaatgataggtggtcaagtagtagatgtagaaagcgaaaacaaacaaattgaaaaagaaaaattagattatatacatatgaataaaactgctgcaatgatggtaggctgtatgagagcaggagctactataggtggagcaaattctgaacaaatggaagaaataactaaatatgcaaaaaatatcggattatcattccagatagtagatgatatactagacatagtaggagatgaagctaagttaggtaaaaaggttggaagtgatatagaaaatcataagtcaacatacccatctcttttaggtttagataaatctaaagaaattgcacataatttgattgatgaagcaaagaaaagtatagaaaaattatctgatgatgtagattttttaaagggattggctgaatatataatagatagagaatactaa

SEQ ID NO: 6174 - protein, 295 aa, Clostridium difficile 630
MEFKQCLKEKASFVEKVLKEYMPKEEGYQKTVIEAMNYSLSAGGKRLRPILTLEACKIVGGNEDEAIPFAIAIEMIHTYSLIHDDLPALDNDDLRRGRPTNHKVYGEAMGILAGDALLNYAFEVMLAGSINKENPEKYLKAINEIAKGAGIYGMIGGQVVDVESENKQIEKEKLDYIHMNKTAAMMVGCMRAGATIGGANSEQMEEITKYAKNIGLSFQIVDDILDIVGDEAKLGKKVGSDIENHKSTYPSLLGLDKSKEIAHNLIDEAKKSIEKLSDDVDFLKGLAEYIIDREY

SEQ ID NO: 6175 - DNA, 885 bp, Herminiimonas arsenicoxydans
  CDS (1)..(885): transl_table=11
atgcaatcgtttgacggctggatgaaagctacgcagggggaaatggaattggcactggtgcagcatttgccgccggtggcactaacgcctgctcgcctgcatgaagccatgcattacgcagtactggatggcggcaaacgcgtgcgtcccttgctggtgtacgccgccggtgccttgttcgatgcggatgccgctgaactggcgcgcgctgccgctgcggttgaaatgatccatgcgtattcgctggtgcatgacgatatgccgtgcatggatgacgatgccttgcgtcgcggcaaaccgaccgtgcatgtgaaatacgacgaagcatgtgccttgctggtcggcgatgccttgcagtcgcaggcgtttgacgtattggcagatggcgggattgatcctgtgcggcaattggcgatggtgcgcctgctggccaaagcttccggttcgctcggcatgtgcggcgggcaggctatcgatctggcaagtgtgggtttgaatttgtcgctggaagaattggaacagatgcatcgcttgaaaaccggtgccttgctgcgcgtatcggtattgctgggcgcactcgccggcaaatctttatccgcagaagaaacacaggcgctggacagttatgcggctgccatcggcctggcatttcaggtagtggacgatgtgctggatgcgactgcagattcagccacgctgggtaaaaccgctggcaaggatgcggcagacaacaagccgacgtacgtatcgatactgggtctggaacaatcgcggaccctggcagaaaaattgcgcaacgatgctcatcgtgcgctggagcagtttggagaaaaagcacgacgcttgcgagagctcgcagacttgatcgtgcagcggaaggcctag

SEQ ID NO: 6176 - protein, 294 aa, Herminiimonas arsenicoxydans
MQSFDGWMKATQGEMELALVQHLPPVALTPARLHEAMHYAVLDGGKRVRPLLVYAAGALFDADAAELARAAAAVEMIHAYSLVHDDMPCMDDDALRRGKPTVHVKYDEACALLVGDALQSQAFDVLADGGIDPVRQLAMVRLLAKASGSLGMCGGQAIDLASVGLNLSLEELEQMHRLKTGALLRVSVLLGALAGKSLSAEETQALDSYAAAIGLAFQVVDDVLDATADSATLGKTAGKDAADNKPTYVSILGLEQSRTLAEKLRNDAHRALEQFGEKARRLRELADLIVQRKA

SEQ ID NO: 6177 - DNA, 843 bp, Dichelobacter nodosus VCS1703A
  CDS (1)..(843): transl_table=11
atgaatttaaacaattatcgcgaccgcgtcgaacacgctttggaacgcgcgttgccgcatgatgaaagcctactgacaaaagccatgcgctacagcacattaaacgccggcaaacgtttgcgggcggcattgatttatgccgttgcagaagatttttctttgccgttgtcgctggttgataacgccgcctgcgcgcttgaatgcattcatgcttattcgctgattcatgatgatttgccggcgatggataatgatgatttgcgccgcggtaaagccagttgtcataaagctttcgatgaggcaaccgcgattttagccggcgatgcgcttaatacgttggcgtttgcattattggcgcgcgatgaaaaaaatggtttggcgcaaattcgttgtttgagcgctgctgcgggcgcgatggtgtgcggacaaagtttggatatgatttataccggcaccgcaattgacgtgcaaaaattgcaaatcattcatcaaaaaaaaaccggcgccctcctcaccgccgcgttgcatttgggcgcactgccgtcgccggattacgcgcattatcaaacgcaattaaccgcgattggcgaacatatcggcatcgcctatcaaattatcgatgatatgctcgatgccaccagcgacagccaaacattgggcaaaaccgccggcaaagatgcgcagcaattaaaaaatacctatatgaactttttttcgccggcaaacattcaatctctaatcgcgcatcatgaacaatgcacgcggcagcaattaaatgctttgcccaattgcgggcaacaattaagcgcggtgatcgatttaatttttcatcggcaacaataa

SEQ ID NO: 6178 - protein, 280 aa, Dichelobacter nodosus VCS1703A
MNLNNYRDRVEHALERALPHDESLLTKAMRYSTLNAGKRLRAALIYAVAEDFSLPLSLVDNAACALECIHAYSLIHDDLPAMDNDDLRRGKASCHKAFDEATAILAGDALNTLAFALLARDEKNGLAQIRCLSAAAGAMVCGQSLDMIYTGTAIDVQKLQIIHQKKTGALLTAALHLGALPSPDYAHYQTQLTAIGEHIGIAYQIIDDMLDATSDSQTLGKTAGKDAQQLKNTYMNFFSPANIQSLIAHHEQCTRQQLNALPNCGQQLSAVIDLIFHRQQ

SEQ ID NO: 6179 - DNA, 885 bp, Candidatus Protochlamydia amoebophila UWE25
  CDS (1)..(885): transl_table=11
atgatggatgttgccaattatttacaaacacaaagtcagcttattgaaaaacgcctggatcaacttgtctccaaacgtcacggccctcaccaaaatttaattgaagctgctcgttatgctcttttaagtggaggaaaaaggctacgtccaattttagctttgacaactgttcagacacttcatggagatattcaagaagctttatctcctgcttgcacattagaacttatccatacttattctcttattcatgatgacttaccttgcatggataatgatgattatcgaagaggaaaactgactgttcatcgccaatattcagaaggccacgccgttttaacgggagacttccttttaacatacgcatttgaacttttagcgaccgataaatatttgacatctgaaaaaaaagttaaacttattactattttatccagacaaagcggatacgatggaatgattggcgggcaagccttggatttagccagcgagggacaaaaaattaatcttgaaacccttcgattacttcatcgtaataaaacagctgctttgattacagcatctgttgaattcggaggaattttagcaaatgcaacagaagaacagctcgctcatatccgggagtttggtgaaaatattgggctggcttttcaaatcactgatgatatccttgatatcacatcaagcgaagccaaacatgggcgaaaaattgggtctgacatcctaaaagataaatcgacttatgtatccttacttggaatagaacaagccaaagcatacgctttaaatttttatcaaaaggccattaatgctttaaaactccttccctatgataattcttttctaatacatttagctgactttattattcatcgtcattattga

SEQ ID NO: 6180 - protein, 294 aa, Candidatus Protochlamydia amoebophila UWE25
MMDVANYLQTQSQLIEKRLDQLVSKRHGPHQNLIEAARYALLSGGKRLRPILALTTVQTLHGDIQEALSPACTLELIHTYSLIHDDLPCMDNDDYRRGKLTVHRQYSEGHAVLTGDFLLTYAFELLATDKYLTSEKKVKLITILSRQSGYDGMIGGQALDLASEGQKINLETLRLLHRNKTAALITASVEFGGILANATEEQLAHIREFGENIGLAFQITDDILDITSSEAKHGRKIGSDILKDKSTYVSLLGIEQAKAYALNFYQKAINALKLLPYDNSFLIHLADFIIHRHY

SEQ ID NO: 6181 - DNA, 906 bp, Bartonella quintana str. Toulouse
  CDS (1)..(906): transl_table=11
atgtatgaatttaccacccttcttgcaaaacacgcccacagtgttgaaaggcgacttgacacactattaagtgatcaagtccaaaatggtgaaatttcccgtcctgaggccttaataaaagccatgcgctatggtgtgttgaatggtggaaagcgcctgcgtccttttcttgttattcaaagtggtgcactctttgatatccctgctgaatactgtctcgacgtcgcaagtgctttagaatgtgtccactgttattcgctcattcatgatgatcttcccgccatggataacgacacactccgacgtggacaacccactgtccacatagcatttgatgaagccacagcaattctggcaggcaacgccctcttgacttttgcttttgaaatcattgctcataaagccagtacactcccctttgaaaccaaaatcaaactgatcacaactcttgcacaatcagcaggacttggcggcatgataggcggacaaatgcttgacctggaagcagaaaaaaaaccacaagatagcgccatcagtattctgactctccaacacatgaaaacagccgctcttataagctttgcttgccaagcaggagcgatcatcggcaatgcttccaaagaattaaccgaaaaacttgctgcttttggaacctatcttggtttagcgtttcaattgacagacgatcttcttgatatcaccgccagcactgaaatcctagggaaaaccgctggtaaagatgaaacagcacaaaaagccacttttgttcgtctttatggcattcaagaaacacaaaaaaaacgagatggactcatcgctaaagcagaagcgcttctgctgccttttggcaccaaagcaaaaccactccaacaagcggcccattttagtgcaacacgcaaaaattaa

SEQ ID NO: 6182 - protein, 301 aa, Bartonella quintana str. Toulouse
MYEFTTLLAKHAHSVERRLDTLLSDQVQNGEISRPEALIKAMRYGVLNGGKRLRPFLVIQSGALFDIPAEYCLDVASALECVHCYSLIHDDLPAMDNDTLRRGQPTVHIAFDEATAILAGNALLTFAFEIIAHKASTLPFETKIKLITTLAQSAGLGGMIGGQMLDLEAEKKPQDSAISILTLQHMKTAALISFACQAGAIIGNASKELTEKLAAFGTYLGLAFQLTDDLLDITASTEILGKTAGKDETAQKATFVRLYGIQETQKKRDGLIAKAEALLLPFGTKAKPLQQAAHFSATRKN

SEQ ID NO: 6183 - DNA, 909 bp, Acinetobacter sp. ADP1
  CDS (1)..(909): transl_table=11
gtgacatcgatttcacatgtaaatgcaaatgtcttgcaagcagctcaggaacgtatccagcaagatttaactacagcgctagatgcttttgatttaccagagcctttaaaatcggctgtctatcataccgtgatgctgggtggaaaacgtgttcgacctgccttatgttatgcagttgcatcaatggagaaaaatccaaattatgctgctgctcgtcgtgcagcagttgccgttgaattgatccactgctattcacttgcgcatgatgacttgccttgtatggacaacgatttgctgcgtcgcggacaaccgacctgccatgtggcttttggcgaagatactgcattgttggcaggtgatattttgcagtcgatggcatttgaggtgctgggcagtcgattatttgatcagcaaaattccgtcgatgcctcgattgtactcagacagatgcagattttggcaacagcaagctctaagatggtttgtggtcaagttcttgatttgcaggcagaaggaaaggaaattgatcaggagcaactggaaaacattcatcgtaataaaacaggtgcgctcatacaggccgcactcatgatgggtgcagtgaccctatttagtgggatggatcaggctattcctcatttacgtcagtttgggcaacggattggtctggcatttcaggtacaggatgatattctggatattatttcgagtaccgaaacattaggtaaaacggctggtaaagatcagcaggttcaaaaatcaacttatccagcattgatgggcctggacgctgcgcagaattatgccaaaaacttgcatgatcaggctttggcttctctggattattttggtgatgctgctatcgagttacagcagatcgtgcagtttttattatcgcgaaaaagttaa

SEQ ID NO: 6184 - protein, 302 aa, Acinetobacter sp. ADP1
MTSISHVNANVLQAAQERIQQDLTTALDAFDLPEPLKSAVYHTVMLGGKRVRPALCYAVASMEKNPNYAAARRAAVAVELIHCYSLAHDDLPCMDNDLLRRGQPTCHVAFGEDTALLAGDILQSMAFEVLGSRLFDQQNSVDASIVLRQMQILATASSKMVCGQVLDLQAEGKEIDQEQLENIHRNKTGALIQAALMMGAVTLFSGMDQAIPHLRQFGQRIGLAFQVQDDILDIISSTETLGKTAGKDQQVQKSTYPALMGLDAAQNYAKNLHDQALASLDYFGDAAIELQQIVQFLLSRKS

SEQ ID NO: 6185 - DNA, 912 bp, Erwinia carotovora subsp. atroseptica SCRI1043
  CDS (1)..(912): transl_table=11
atgaccgatttcagcgcgcaactgaatgcgcattatcaacgcactaaccgtatgttggggcatttcatcaccagcctcccctttcagagtagtccactagtcaatgcgatggagtatggctcactcttagggggcaaacgcctgcgtccgtttctggtttatactacaggcgaactgtttgatatgccgctagagagcctggacgcccctgctgctgctgtagaatgtatccatgcctattcattgattcatgacgatctgccggcgatggacgacgacgatttacgccgtggacagccgacctgccacatcaaatttggtgaagccactgccattctcgcgggcgatgcattgcaaacgctggcattctctattctggccgacgcaccgatgacgcaggtctctgaccgcgatcggctggcaatgatctcagaattagcgcaggcaagtggcgtagcaggtatgtgcggcggtcaggctttcgatctggaagcagaaggccatcaggtcaatctggctgcattagagcgaattcatcgccacaaaacaggtgccttgatccgcgccgccgttcgactgggcgcactggcagccggtgacgctggccgcgacgccttaccttatctggatcgctacgctaacgcgattgggctcgccttccaggttcaggacgatattctcgatgttgttggcgacagcgcgacaacaggcaaacgtcagggtgcagaccagcagttaggtaaaagcacctatcccagtttactggggttagataatgcacgaaaaaaagcacaggagctctatcaggaatcactggcatcgctggacgatctcgtcgcatccagcccgatccccctgaatattgcgccactacaagcgctggcgaatttcatcgttgaacgcgataagtaa

SEQ ID NO: 6186 - protein, 303 aa, Erwinia carotovora subsp. atroseptica SCRI1043
MTDFSAQLNAHYQRTNRMLGHFITSLPFQSSPLVNAMEYGSLLGGKRLRPFLVYTTGELFDMPLESLDAPAAAVECIHAYSLIHDDLPAMDDDDLRRGQPTCHIKFGEATAILAGDALQTLAFSILADAPMTQVSDRDRLAMISELAQASGVAGMCGGQAFDLEAEGHQVNLAALERIHRHKTGALIRAAVRLGALAAGDAGRDALPYLDRYANAIGLAFQVQDDILDVVGDSATTGKRQGADQQLGKSTYPSLLGLDNARKKAQELYQESLASLDDLVASSPIPLNIAPLQALANFIVERDK

SEQ ID NO: 6187 - DNA, 897 bp, Desulfotalea psychrophila LSv54
  CDS (1)..(897): transl_table=11
ttgaatataaaaaattatcttgagcaaaagcgaagccttgttgaagaggccatggatcgttttatgctcgaagaatctgggcccttcaaaaaacatatagaggcaatgcgttacagcctttttgcaggcggaaaacgaattcgcccgatactctgtctagccgcagcagacagcatctgtgcgcaggagagaacacaagaaaacctccttcccgttgcctgcgcgcttgaatgtattcacacctactccctcatccatgatgacctaccagccatggacgatgatcaattacgccgaggaaaggcgacgaaccacgttctttacggcgaagcaggagccattctcgcaggagacggtctactctcctgggcttttgacctgatcgccgatagaggtaagggtaacctgaccgctgaaaaacgacttgatatttgccatatggtggccagagcagcaggatccctcggcatggtaggagggcagcaactcgatattcaaagcgaaaacaaagagatcgattttgacaccctagccaccattcaccgcagcaaaacgggagccctaataacctgttctataatgagcggggccattggtgccggagcaaatgccaaacaactccacgccttggaagagtacggcaataatattggtcttgcctttcagatcatcgatgatctgctggatgcaacggcgaccacagaggagttgggcaagacggcaggcagtgatgctgaacatggcaaggccacctatcccctctttttcggtatcgacaagacccgggaaaaagcaaaagcagccgttgacaatgccataaaagccctcaccttatttgatcatagggcagatcctctgagaggacttgccaactatatatattcccgaaccaactag

SEQ ID NO: 6188 - protein, 298 aa, Desulfotalea psychrophila LSv54
MNIKNYLEQKRSLVEEAMDRFMLEESGPFKKHIEAMRYSLFAGGKRIRPILCLAAADSICAQERTQENLLPVACALECIHTYSLIHDDLPAMDDDQLRRGKATNHVLYGEAGAILAGDGLLSWAFDLIADRGKGNLTAEKRLDICHMVARAAGSLGMVGGQQLDIQSENKEIDFDTLATIHRSKTGALITCSIMSGAIGAGANAKQLHALEEYGNNIGLAFQIIDDLLDATATTEELGKTAGSDAEHGKATYPLFFGIDKTREKAKAAVDNAIKALTLFDHRADPLRGLANYIYSRTN

SEQ ID NO: 6189 - DNA, 921 bp, Yersinia pseudotuberculosis IP 32953
  CDS (1)..(921): transl_table=11
atgtcggatacccatgcacctgttgattttaaacaacaacttgccgctcatcagcagcgagtcaatcaggctctgctggatttcattgctcccctgccgtttggcaatagcaatttaatcgaggccatgcgctatggtgcggtaatcgggggtaagcgtctccgcccctatctggtctatgccacagggcaaatgtttggtttgtcactcgccaacttagacgccccggcggcggcaattgaatgtattcatgcctattcattaatacatgatgatctgcccgccatggacgatgatgatttacgccgtgggcagccgacttgccacgttaagtttggcgaggcccacgctattttggccggtgatgcactgcaaacgctggccttttctattttggctgaagcccccatgcccgatgtcgctgataaagatcgcctatcgatgattatcgagttggctcaagctagtggggctgcggggatgtgtgcgggtcaggcgctagatctggaagcagaaactcgccctgttttattaggtgaccttgagcaaatccaccgtcataaaaccggtgcgttgattcgtgcggcagttcgccttggcgccctggcagccggtgaagctggccgtaaaacattattgtcactcgatcgttacgccgaggccatcggtttagcctttcaagtccaggacgatattttagacgtcattggcgacacagctacaattggtaaacgtcaaggctcagaccaacaactaggcaaaagtacttatccggcgctacttggtctggattgtgcccaaacaaaagcgatggatctttatcaggaggcactagaggccttggatgaattggcaaaacagtcctataacacggattcattgcaggcattagctcgtttcattattgagcgtaataattaa

SEQ ID NO: 6190 - protein, 306 aa, Yersinia pseudotuberculosis IP 32953
MSDTHAPVDFKQQLAAHQQRVNQALLDFIAPLPFGNSNLIEAMRYGAVIGGKRLRPYLVYATGQMFGLSLANLDAPAAAIECIHAYSLIHDDLPAMDDDDLRRGQPTCHVKFGEAHAILAGDALQTLAFSILAEAPMPDVADKDRLSMIIELAQASGAAGMCAGQALDLEAETRPVLLGDLEQIHRHKTGALIRAAVRLGALAAGEAGRKTLLSLDRYAEAIGLAFQVQDDILDVIGDTATIGKRQGSDQQLGKSTYPALLGLDCAQTKAMDLYQEALEALDELAKQSYNTDSLQALARFIIERNN

SEQ ID NO: 6191 - DNA, 894 bp, Symbiobacterium thermophilum IAM 14863
  CDS (1)..(894): transl_table=11
ttgaggggcgagtttcagcagtacatggccgcgcggcggcagcaggtggaggcggcgctggaccggtacaccgccgggctcgacgcgccttcccggctggtggaggccatgcggtacagcctccttgccggaggcaagcggctccggccgatcctgaccattgccgcgtccgagctcttcggtctggaggcggccgacgtgatgcccggcgcctgcgccctggagatgattcacacctactcgctcatccacgacgacctgccctgcatggacgacgacgacctgcgccggggccgtcccacctgccacaaggtctacggcgaggccatggctgtgctcgcgggggacgcgctgctcacccaggccttcgcgctgatggccgagcaggcagccgtcccgcgcgtcgggccggcgcgcgcggtgcgggctgccgcggagctcgcccacgccgcgggagccgagggcatggtcggcgggcaggtggaggacttggcgtgggagggccgccaggcggacgaaccgcagctcaggcggatccactccctgaagaccggcgcgctgttccgcgccgccgtgcgtatgggcggcatcctcgccggtgcaggcgaggaggacctggaccggctggggcgctacgcgacgcacttcgggcttgccttccagatctgggacgacgtgctggacgtgaccggcgacgccgccctgacggggaagggcgtcggccgcgacgcccggctggacaagtccacctacgtcaccctgcacggcgtggaaggcgcgcgcgagcgcgcctaccaggccgtccgactggcgctggaggagctggagcccttcggcggagcgggctgggtgctcagggccttggcagaatctgtggttgaccgcgtcgcctga

SEQ ID NO: 6192 - protein, 297 aa, Symbiobacterium thermophilum IAM 14863
MRGEFQQYMAARRQQVEAALDRYTAGLDAPSRLVEAMRYSLLAGGKRLRPILTIAASELFGLEAADVMPGACALEMIHTYSLIHDDLPCMDDDDLRRGRPTCHKVYGEAMAVLAGDALLTQAFALMAEQAAVPRVGPARAVRAAAELAHAAGAEGMVGGQVEDLAWEGRQADEPQLRRIHSLKTGALFRAAVRMGGILAGAGEEDLDRLGRYATHFGLAFQIWDDVLDVTGDAALTGKGVGRDARLDKSTYVTLHGVEGARERAYQAVRLALEELEPFGGAGWVLRALAESVVDRVA

SEQ ID NO: 6193 - DNA, 903 bp, Mannheimia succiniciproducens MBEL55E
  CDS (1)..(903): transl_table=11
gtgatgagacttatgtatcaattttcaaatgatttacaacaagcgcaacaacgcattaaccgatttctagaagctcaattcgatgaaataaatacccgtccctcgccgctggccgatgcaatgaaatacggattattattaggcggcaaacgcattcgtccgtttttggtttatgccaccggccgtatgttgggcgcggatacggcacaactggattatgccgccgccgctatcgaagctattcatgcttattccttaattcatgacgatttaccggcgatggataatgacagtttacgccgcggacagccgacctgccatattgcctttgatcatgccaccgctattttagccggtgacgcgctacaggcttttgctttcgaaattctgacaaaatccaccgcactttccgccgaacaaaaactccgtttaattcaggttttaagtcataattccggtgtcttcggtatgtgcctggggcaaagccttgatcttatttctgaacataaacagatttcactgagcgaactggaacaaattcatcgcaacaaaacaggcgctttactttccgccgcgttaaaaatgggctttatttgttcgtcgcattttgccgacaacgcattggaagccaaactggatcgctatgccgccgctatcggtctggcatttcaggttcaggacgatattttagacatcgagggcgatctggcggcaatcggtaagaatgtcggctcggatttagagtcggataaaagcacttatcctaaattactgggtttagccggtgcaaaacaaaaagcacgagaactttatgttgcggcggtcggtgaattagaacatttaccttttgatacaacggcacttcgtgctttagccgaatttattattaatcgaaaaaattaa

SEQ ID NO: 6194 - protein, 300 aa, Mannheimia succiniciproducens MBEL55E
MMRLMYQFSNDLQQAQQRINRFLEAQFDEINTRPSPLADAMKYGLLLGGKRIRPFLVYATGRMLGADTAQLDYAAAAIEAIHAYSLIHDDLPAMDNDSLRRGQPTCHIAFDHATAILAGDALQAFAFEILTKSTALSAEQKLRLIQVLSHNSGVFGMCLGQSLDLISEHKQISLSELEQIHRNKTGALLSAALKMGFICSSHFADNALEAKLDRYAAAIGLAFQVQDDILDIEGDLAAIGKNVGSDLESDKSTYPKLLGLAGAKQKARELYVAAVGELEHLPFDTTALRALAEFIINRKN

SEQ ID NO: 6195 - DNA, 891 bp, Bacillus licheniformis ATCC 14580
  CDS (1)..(891): transl_table=11
gtgaccggtaaacttgaaggatttttaaaatcgagaaaaacagtaattgaagagcgccttccgatgtatattaaagacttgcaagcgccgtccatcctcaaggaatccatgctgtactcattggaagccggggggaaacggctgagaccgatattggttcttgcgcttcttcatgcgtacggaaaagacgaagaagccggaattccagtcggatgcgcggttgaaatgatccatacgtattcattaatccatgacgacctcccttgtatggatgacgatgacctcagaagaggtaagccgacaaaccacaaaatttacggggaggcgacggccattctcgcgggagacgccttattaaccgaaagcttcaaaatgatcacttccaatatgccttctgatgtatccgctgaaaagcgcatcagactggtgaacgagctgatttcggcagcgggggccgaaggcatggtcggcggtcagattttagatatggaagcggaatcaaagtctgtatctcttgatgaactgcagcgaatccacgaaggaaaaacggctaaactcctcagcttcagcgtcattgcgggagccattcttgcagatgcatctgaaaaagagatcgaaaagctgcgcgaattcagccatcatatcggcatcggctttcagatcagagatgacattttggaccttgaaggctcggaggataagatcggcaaacggatcggatccgacgcttcaaacggaaagtcgacgtatccgtcgctcctttcgcttgagggcgccagccaaaaacttgatgaacatattgaaaaagcaaaacagctgatttcagagcttccgcttgaaaaagagcttatgtacgagttctgcgatatgattgccgctagggatcattga

SEQ ID NO: 6196 - protein, 296 aa, Bacillus licheniformis ATCC 14580
MTGKLEGFLKSRKTVIEERLPMYIKDLQAPSILKESMLYSLEAGGKRLRPILVLALLHAYGKDEEAGIPVGCAVEMIHTYSLIHDDLPCMDDDDLRRGKPTNHKIYGEATAILAGDALLTESFKMITSNMPSDVSAEKRIRLVNELISAAGAEGMVGGQILDMEAESKSVSLDELQRIHEGKTAKLLSFSVIAGAILADASEKEIEKLREFSHHIGIGFQIRDDILDLEGSEDKIGKRIGSDASNGKSTYPSLLSLEGASQKLDEHIEKAKQLISELPLEKELMYEFCDMIAARDH

SEQ ID NO: 6197 - DNA, 903 bp, Methylococcus capsulatus str. Bath
  CDS (1)..(903): transl_table=11
atgaaccctgaacgatctctgagcgatttcatgcggtccagccaggagcgggtggaacgagcgctggatgcacgcctgccggccgccgaccgcatgccggagcggctccatcaagccatgcgctactcggtgctgggtggcggcaagcgcatgcgccccctgctcacctacgccaccggccagaccatcggcgtggcggcggacctgctcgacggccccgcctgcgcggttgaattcatccatgtctattcgctgattcacgacgatctgccggcgatggacgacgacgacctgcgtcgaggcaaaccgacctgccacaaggcctatgacgaggccaccgcgatactcgcgggagacggcctgcaggccctggccttccacgtcctcgcccaggatcccagcatcgccgtgccggcggaaaaccgcatcgccatgatcgaaaccctggcaaaagccagcggccccgccggcatggtcggcggccaggcgatcgacctggcttcggtgggtaagaagctggacctgccggggctggagaacatgcatatccgcaagaccggcgccctgatccgtgccagcgtgcggctggcctgcctggcccgtcccggtctgccggctgaacaattcgaccgcctggaccactacgccaagtgcatcggcctcgctttccagatccaggatgacatcctcgacgaagagagcgacacccagaccttgggaaaaactcgaggcaaggaccgcgaccacaacaagcccaactacccggccttgctggggctgagcggcgccaaagaaaaagcggaagaaatgcacgaggcagccctggaaagcctggccggcttcggccccgaagccgatctgctgcgcgaactcgcccgcttcatcatccagcggcagagctag

SEQ ID NO: 6198 - protein, 300 aa, Methylococcus capsulatus str. Bath
MNPERSLSDFMRSSQERVERALDARLPAADRMPERLHQAMRYSVLGGGKRMRPLLTYATGQTIGVAADLLDGPACAVEFIHVYSLIHDDLPAMDDDDLRRGKPTCHKAYDEATAILAGDGLQALAFHVLAQDPSIAVPAENRIAMIETLAKASGPAGMVGGQAIDLASVGKKLDLPGLENMHIRKTGALIRASVRLACLARPGLPAEQFDRLDHYAKCIGLAFQIQDDILDEESDTQTLGKTRGKDRDHNKPNYPALLGLSGAKEKAEEMHEAALESLAGFGPEADLLRELARFIIQRQS

SEQ ID NO: 6199 - DNA, 882 bp, Staphylococcus epidermidis RP62A
  CDS (1)..(882): transl_table=11
atgaagaaactacagatgaataaattaataaatataattaatacatcactgaataagtcaatacaatcatcaccattaaaaactaatttagaagaaagtatgaaatattcattaaatgctggtggtaaaagaatcagaccagtcatattattattaacactaaaaatgcttaacaaagattatcaacaaggactaaatagtgctttagcattggaaatgattcatacttattctttaattcatgatgatttaccagcaatggataatgacgattaccgtagaggaaaattaacaaatcataaagtttatggtgaatggaaagccattcttgctggtgatgcattattaacaaaagcttttgaattagtttctaatgatactaccattgaagatagtgtgaaagtaagtattataaaaagactttcaaaagcaagtggacatttgggaatggtgggtggccaagcgcttgatatggaaagtgaagggaagtcaattcgtttagaaactttagaatcaattcatgaaactaagacaggcgctttactaaatttttcagttatggctgcggtagacattgctcaagtagaacaaaatattgctaagaatttagatgaatttagtcatcatttaggaatgatgtttcaaattaaagatgatttactggatgtgtatggtgatgaatcaaaacttggcaaaaaagtaggcagtgatatagtaaatcataaaagtacttatgtttctttacttggaaaagaaggagcagaagaaaagttaaacaatcatcaatatcttgctatgaactgcttaaatcaaatttctgatcaatatgatacttctgaattaagtgatattgtagatttattctataacagagaccattaa

SEQ ID NO: 6200 - protein, 293 aa, Staphylococcus epidermidis RP62A
MKKLQMNKLINIINTSLNKSIQSSPLKTNLEESMKYSLNAGGKRIRPVILLLTLKMLNKDYQQGLNSALALEMIHTYSLIHDDLPAMDNDDYRRGKLTNHKVYGEWKAILAGDALLTKAFELVSNDTTIEDSVKVSIIKRLSKASGHLGMVGGQALDMESEGKSIRLETLESIHETKTGALLNFSVMAAVDIAQVEQNIAKNLDEFSHHLGMMFQIKDDLLDVYGDESKLGKKVGSDIVNHKSTYVSLLGKEGAEEKLNNHQYLAMNCLNQISDQYDTSELSDIVDLFYNRDH

SEQ ID NO: 6201 - DNA, 897 bp, Neisseria gonorrhoeae FA 1090
  CDS (1)..(897): transl_table=11
ttgaatccgacgaatgatttgaaagcgtggcaacagagggcgcaggcgcagacagagctgctgctggaacgctttttgccgtctggaaacgaaatcccgcacacgctgcacgaagcgatgcgctatgcggctttggacggcggcaagcgtctgcgcccgatgctggtgctggcggcttcggaattgggcggggccatggcggatgcggtcggacaggcaatggcggcaatcgaaatgatccacgtctattctttggttcacgacgatatgccggcgatggacaacgacagcctgcggcgcggcaaaccgacctgccacatcaaatatggcgaagccaccgcccttctgaccggcgacgctttacaaacccaagccttcgacgtgttgagccgtccgacagaactgcccgccgcacgccagttggcaatgttgtcggtgttggcaaaagcgggcggcagcgcgggtatggcgggcggacaggcaatcgatttggcaaatgtcggcaaacaaatggttcaagccgatttggaacggatgcacagcctgaaaacgggggcgttgatccgtgcggcggttttattgggggcgacggcgtgtcccgatctgtccgacgcggaacttgccgtattggacgcttacgcggcaaaactgggtttggcgttccaagtcatcgacgatgtgttggattgtgaagcggacacggcgactttgggcaagacggcgggcaaagatgccgacaacgacaagccgacttatgtgaaactgatgggcttggaagcggcgcgctcatacgcacacaaactggttgccgaagcagtcgcgctgctcgaacccttcggcgacaaagccctgcgcctgcggcagttggcagaatttgcagtcgcacgcaaatattaa

SEQ ID NO: 6202 - protein, 298 aa, Neisseria gonorrhoeae FA 1090
MNPTNDLKAWQQRAQAQTELLLERFLPSGNEIPHTLHEAMRYAALDGGKRLRPMLVLAASELGGAMADAVGQAMAAIEMIHVYSLVHDDMPAMDNDSLRRGKPTCHIKYGEATALLTGDALQTQAFDVLSRPTELPAARQLAMLSVLAKAGGSAGMAGGQAIDLANVGKQMVQADLERMHSLKTGALIRAAVLLGATACPDLSDAELAVLDAYAAKLGLAFQVIDDVLDCEADTATLGKTAGKDADNDKPTYVKLMGLEAARSYAHKLVAEAVALLEPFGDKALRLRQLAEFAVARKY

SEQ ID NO: 6203 - DNA, 888 bp, Pseudomonas fluorescens Pf-5
  CDS (1)..(888): transl_table=11
atgattaccgcctatcaggcctccagccaggcccgcgtcgacgctgcaatgcacaccctgttcaccgcccctagccccgaacttgcccgcctctatgaagccatgcgctacagcgtgatgaatggcggcaagcgcgtgcgcccgctgctggcctacgccgcctgcgaggccctgggcggcaagcccgagcaagccaacggcgccgcctgcgcggtggagctgatccacgcctattccctggtgcacgacgacctgccggccatggacgatgacgacctgcgccgcggccagcccactacccacaaggctttcgatgaagcctgcgcgatcctcgccggcgacggcctgcagagcctggccttcagcgccctgctggacccggccctgagcgacgccagcgccgagatccgcctgcgcatggtcaccaccctggcccaggccgcgggcccggcgggcatggtcggcggccaggccatcgacctcggctccgtggggctcaagctggaccagcaggccctggaatacatgcatcggcacaagaccggggcactgatcgaagccagcgtgatccttggcgccctggccagcggccgggccgaaaagggcgagctcaaggccctgcaaacctacgctcaggccattggcctggcgttccaggtgcaggacgacattctcgatgtcgaaagcgacaccgccaccctgggcaagcgccagggcgccgatatcgcccgggacaagccgacctacccggccttgctgggcctggccgcggccaaggagtacgccctggaactgcgcgaccaggcgctgcatgccctgcgtccgtttgacgcagcggccgagccgctgcgcgagctggcgcgctatatcgtcgaacgccgcagctga

SEQ ID NO: 6204 - protein, 295 aa, Pseudomonas fluorescens Pf-5
MITAYQASSQARVDAAMHTLFTAPSPELARLYEAMRYSVMNGGKRVRPLLAYAACEALGGKPEQANGAACAVELIHAYSLVHDDLPAMDDDDLRRGQPTTHKAFDEACAILAGDGLQSLAFSALLDPALSDASAEIRLRMVTTLAQAAGPAGMVGGQAIDLGSVGLKLDQQALEYMHRHKTGALIEASVILGALASGRAEKGELKALQTYAQAIGLAFQVQDDILDVESDTATLGKRQGADIARDKPTYPALLGLAAAKEYALELRDQALHALRPFDAAAEPLRELARYIVERRS

SEQ ID NO: 6205 - DNA, 903 bp, Colwellia psychrerythraea 34H
  CDS (1)..(903): transl_table=11
atgactacattaatttcttacgcccattatcaagagcgcattaatgactttttagccgctaagctcgaaggccttaccatcaatgatcctaagcttattgaagccatgcgttatggtttgcttattggtggaaaacgcatgcgtccttacttagcctatattaccggcgaagcagtttcagctgatttgaacgatattgacgcagtagccggtgctttagagtgtattcacgcttactcacttttgcatgatgacttacctgcgatggatgacgatgatttaagacgcggtaaaccgacttgtcataaagcatttgatgaagcaacagcaatactagcgggcgatgctttgcagacacttgcttttgatattttagctaatcatacgttttcaatgaatcaaagtactgctggaatgcctatccaggtaaaactaattcaacaattagttaaagcttctggttatcaagggatgtgtggcggacaagcacttgatttagcggcaacgggtaaaaacatttcactaggtgaattggaagttttacattcgcttaaaactggcgctttattggaagcatcagtattaatgccagcaatgtgcagtggacaagtcacccgtgaatataaaataatattaagcgagtacgcacaactcattggcttagcctaccaagtgcaagatgatattattgacttaacatcaaccgaagaagaactaggtaaacccgttggatctgatatagcagcgaacaaaagcacttatcctgcactgctcggtttacaaggtgcacaagacaaagcggaaaacttattacaacaagcgcttcaagctttgagcagattaccttacaatacccaatctttagcagattttgccacttttattgttaaacgcagccactag

SEQ ID NO: 6206 - protein, 300 aa, Colwellia psychrerythraea 34H
MTTLISYAHYQERINDFLAAKLEGLTINDPKLIEAMRYGLLIGGKRMRPYLAYITGEAVSADLNDIDAVAGALECIHAYSLLHDDLPAMDDDDLRRGKPTCHKAFDEATAILAGDALQTLAFDILANHTFSMNQSTAGMPIQVKLIQQLVKASGYQGMCGGQALDLAATGKNISLGELEVLHSLKTGALLEASVLMPAMCSGQVTREYKIILSEYAQLIGLAYQVQDDIIDLTSTEEELGKPVGSDIAANKSTYPALLGLQGAQDKAENLLQQALQALSRLPYNTQSLADFATFIVKRSH

SEQ ID NO: 6207 - DNA, 894 bp, Dechloromonas aromatica RCB
  CDS (1)..(894): transl_table=11
gtgagcatcaagcccttcgccgaatggatggcggtcacccaggaccgcgcagaatccgcgctcggccgctttttgcccggccccgactgcattcccgcccgcctgcacgaagccatgcgctacgccaccctcggcggcggcaagcgcgtccgtccgctgctcgcccacgccgccggcgaattgaccggtgcgacgccggaggccctcgacatcgtcggctgcgccgtcgaaatgatccacgcctattcgctggtccatgacgacctgccgtgcatggacgatgacgtgctgcgccgcggccgtccgacctgccacgtcgaattcgacgaaccgaccgcgctgctcgtcggtgacagcctgcagaccatggccttcgaactgctcgccagccagccgcttggcgaaccgaagcaacaactcgaaataatcgccctgctcgcccacgccagcggttcgcgcggcatggccggcggccaggccatcgacctcgcctcggtcggcaaaccgctgacccagcccgaactcgaactgatgcacgcgctgaaaaccggcgccctgatccgcgccgccgtgttgcttggcgccctggctggccagcccctttcggccgacgaacgaaccagcctcgaccgtttcgccaagcgcgccggcctgctctttcaggtggtcgatgacatcctcgactgcaccgccagcaccgctacgctgggcaagactgccggcaaggacgaggcggccgacaaaccgacctacgtcgccctgctcggccttgacgcggcccgcacctacgccgacgaactgcgcgccgacgcccgcgacgccctgagcatcttcggcgagcgtgccagccgcctcaatcagttggccgacttcatctgccaccggcaattctga

SEQ ID NO: 6208 - protein, 297 aa, Dechloromonas aromatica RCB
MSIKPFAEWMAVTQDRAESALGRFLPGPDCIPARLHEAMRYATLGGGKRVRPLLAHAAGELTGATPEALDIVGCAVEMIHAYSLVHDDLPCMDDDVLRRGRPTCHVEFDEPTALLVGDSLQTMAFELLASQPLGEPKQQLEIIALLAHASGSRGMAGGQAIDLASVGKPLTQPELELMHALKTGALIRAAVLLGALAGQPLSADERTSLDRFAKRAGLLFQVVDDILDCTASTATLGKTAGKDEAADKPTYVALLGLDAARTYADELRADARDALSIFGERASRLNQLADFICHRQF

SEQ ID NO: 6209 - DNA, 885 bp, Ralstonia eutropha JMP134
  CDS (1)..(885): transl_table=11
atgaccgaattcgcaagctggatgcgggcgcagggggcccggaccgaggccgcgctggaccaaacgttgccaaatgccgacaccgtgccgcatacactgcatgaggccatgcgctatgctgtgctcggcggtggcaagcgcgtgcggccgctgctggtgcatgccgccggtgaagtgacgggtgcgagcgccgaggcctgcgacgccgcagcctgcgcggtggagatgatccacgcctactcgcttgtacacgacgacatgccctgcatggatgacgacgacctgcgccgcggccgcccgaccgtgcacaaggcctatgacgaagccacggcgctgctcgtcggcgacgcgctgcagacgcaggcgttcatcgtgctggcgcaggcacaatcggtacaggccgaggcgcggctgaagctcgtggccgaactggccgtggcatctggctcggtcggcatggccggtggccaggccatcgacctgcagaacgtgggcaaggccatgtcgcgcgatgcgctggaggccatgcaccgcatgaagaccggtgcgctgctgcgcgcaagcgtgcgcatgggcgcgctctgtggtgaaatcgacgcgcagggactgtcggcgctggaccggtatgccgcagccgtgggtttggcgtttcaggtagtagacgatattctggacgtcaccgccgataccgccacgcttggcaagaccgccggcaaggacgccgcgcatgacaagccgacctatgtctcgctgatggggctggaagcggcgcgcgcactggcggccgagctgcgcgagtccgcgcatgcggcactggccggtttcggcgcacgcgcgggccgcctggccgatctggcggacctgatcgtgctgcgcacacattga

SEQ ID NO: 6210 - protein, 294 aa, Ralstonia eutropha JMP134
MTEFASWMRAQGARTEAALDQTLPNADTVPHTLHEAMRYAVLGGGKRVRPLLVHAAGEVTGASAEACDAAACAVEMIHAYSLVHDDMPCMDDDDLRRGRPTVHKAYDEATALLVGDALQTQAFIVLAQAQSVQAEARLKLVAELAVASGSVGMAGGQAIDLQNVGKAMSRDALEAMHRMKTGALLRASVRMGALCGEIDAQGLSALDRYAAAVGLAFQVVDDILDVTADTATLGKTAGKDAAHDKPTYVSLMGLEAARALAAELRESAHAALAGFGARAGRLADLADLIVLRTH

SEQ ID NO: 6211 - DNA, 891 bp, Thiobacillus denitrificans ATCC 25259
  CDS (1)..(891): transl_table=11
gtgatgagtgatttttccgcctggacacaggcatgccaggcgcgtatcgaacacgtgctggccgagcggctgccgccgtccgacattgcaccgaagcggctgcacgaggccatgcgctacgcggtgctgggcggcggaaaacgcgtgcgtccgctgctggcgttcgccgccggcgacgtcacgggcgccgccgtcgaacaggtgcagcacgcggcggccgcggtcgaattgattcacgcctattcgctcgttcacgacgacatgccggcgatggacgacgacgcgctgcgccgcggcaagcccaccgtccatgtcgagttcgacgagccgaccgcgctgctcgtgggcgacgcgctgcagagcctcgccttcgacatcctggcgagccccggactggcgcaggccgcttcgacgcaactcgcgatggtgcagctgctggcccgggcgtccggctcgcgcggcatggccggcggccaggcgatcgacctcgcgaacgtcggcaagtctctcgacctcaccgaactcgaattcatgcacatccacaagacgggcgccctgatccgcgcgtcggtcctgctcggcgccgagtgcggcacgctgtcggagcctgcgcgcacggcgctcgaccattacgcgaaatgcatcggcctcgccttccaggtcgtcgacgatgtgctcgacgccgaggcgtcgaccgcgacgctcggcaaaaccgcgggcaaggacgcggcgaacaacaagccgacctacgtcagtctgctcggcgtccaacgcgcccgcgaacgggccctggaattgcgcgccgacgcctgcgccgcgctcgatccgctcggtccgtccgcgcgacgcctgcgcgagctggcggatttcgtcgtcgagcggacgttctga

SEQ ID NO: 6212 - protein, 296 aa, Thiobacillus denitrificans ATCC 25259
MMSDFSAWTQACQARIEHVLAERLPPSDIAPKRLHEAMRYAVLGGGKRVRPLLAFAAGDVTGAAVEQVQHAAAAVELIHAYSLVHDDMPAMDDDALRRGKPTVHVEFDEPTALLVGDALQSLAFDILASPGLAQAASTQLAMVQLLARASGSRGMAGGQAIDLANVGKSLDLTELEFMHIHKTGALIRASVLLGAECGTLSEPARTALDHYAKCIGLAFQVVDDVLDAEASTATLGKTAGKDAANNKPTYVSLLGVQRARERALELRADACAALDPLGPSARRLRELADFVVERTF

SEQ ID NO: 6213 - DNA, 930 bp, Anabaena variabilis ATCC 29413
  CDS (1)..(930): transl_table=11
atggtagcagctgataacctccagaagatgtcagaggaagccaaatttaatctagtagcttatcttaaagagcggcaaaaactttgtgaagcggctttggatgaagccatacctgttatttatccagaaaaaatttatgaatcgatgcgctactccttattagctggaggtaagcgcttgcgtccgattctttgtctggctacttcggaaatgatgggtggaacaatcgaaatagctatgccaacagcttgcgctgtggaaatgatccacaccatgtctttgattcacgacgacttgccagcaatggataacgacgattaccgtcgcggtatgctgacgaatcacaaggtatatggtgatgatattgcgattttggcgggagatggcttattagcctatgctttcgagttcgtagctatccgtactcctgaaagcgtgcctagagaccgagtattgcaggtagtagcccgattgggacgagcattaggagctgctggcttggttgggggtcaagtagttgacttagactcagaagggaaatcagatatttccttagaaacgctcaattttattcataatcacaaaacagcagctcttttagaagcttgtgtggtctgtggcggcattttagctggggcatcatcagaagatgtacaaagactttcacggtattctcaaaatattgggctagcatttcaaatcatcgatgatattcttgatatcacttctactcaagagcaattaggcaagactgcgggtaaagaccttttagcgaagaaagtcacctatcctagcctatggggaattgaacaatcacgggtcaaagcccaacagctaattgaagcagcttgtgcagaactagaaccatttggagaagatgcacagcctctgaaagcgatcgctcacttcatcactagccgtaatcactaa

SEQ ID NO: 6214 - protein, 309 aa, Anabaena variabilis ATCC 29413
MVAADNLQKMSEEAKFNLVAYLKERQKLCEAALDEAIPVIYPEKIYESMRYSLLAGGKRLRPILCLATSEMMGGTIEIAMPTACAVEMIHTMSLIHDDLPAMDNDDYRRGMLTNHKVYGDDIAILAGDGLLAYAFEFVAIRTPESVPRDRVLQVVARLGRALGAAGLVGGQVVDLDSEGKSDISLETLNFIHNHKTAALLEACVVCGGILAGASSEDVQRLSRYSQNIGLAFQIIDDILDITSTQEQLGKTAGKDLLAKKVTYPSLWGIEQSRVKAQQLIEAACAELEPFGEDAQPLKAIAHFITSRNH

SEQ ID NO: 6215 - DNA, 888 bp, Carboxydothermus hydrogenoformans Z-2901
  CDS (1)..(888): transl_table=11
atggagtttgaaagcctttttaaaagatatcggaaaatggtagaagaaggtattgggcgttttctgcccccggatgatacctatccgccagtaattcaccaagcgatgaactacagccttaaagctggtgggaaaaggttaagaccagtcctgatgctggctgcaggggaatggagtgggattgctccggaaaaattgctcccggcggcggtaggggtggagtgtctgcacacctattcgcttattcacgatgacctgccggcaatggataacgatgattttcgcaggggaaagccaactaaccacaaagtttttggggaagccattgctattttagcgggagatgctttattaaccaaagcttttgaactaactgccaagaccttggaacaggggatacccgcggagcgggtggtccgggtaattcaagaactggcggtagcttccggctccgaggggcttattgcaggccaggtggtggatttaagctccagtgaagccaaaaaagaccccgaggttttgttatatattcatcttaacaaaactgctcgcctgatacgctatagtttaattgccggagggattttggcgggagctaccgaagaagaaattaaagctctggatgattacgggcgccatttgggcctagcttttcaaattgttgatgacctgttggatgtagttggtgattttcaaaagattggaaaaccggtggggagtgacgaaaaaaatcaaaagcttacctatgtttcgctttttggtattgaggaaaccaaaaaaagggcggaagaagaaattaatgcggcaaagaatgttttaaagccctatggtgagaaaagcagcttttttataaagcttgctgaatttatcctaaaaagagaatcttag

SEQ ID NO: 6216 - protein, 295 aa, Carboxydothermus hydrogenoformans Z-2901
MEFESLFKRYRKMVEEGIGRFLPPDDTYPPVIHQAMNYSLKAGGKRLRPVLMLAAGEWSGIAPEKLLPAAVGVECLHTYSLIHDDLPAMDNDDFRRGKPTNHKVFGEAIAILAGDALLTKAFELTAKTLEQGIPAERVVRVIQELAVASGSEGLIAGQVVDLSSSEAKKDPEVLLYIHLNKTARLIRYSLIAGGILAGATEEEIKALDDYGRHLGLAFQIVDDLLDVVGDFQKIGKPVGSDEKNQKLTYVSLFGIEETKKRAEEEINAAKNVLKPYGEKSSFFIKLAEFILKRES

SEQ ID NO: 6217 - DNA, 891 bp, Synechococcus sp. CC9605
  CDS (1)..(891): transl_table=11
atgagcgccgagttcgatttcaaggcctatctcggcaaggccaaagagcaggtggaagcggccctagatggatccctcggtcctgagcggccggagtccctcagggaagcgatgcgctactcgctgcttgcaggtggcaagcgcctgcgcccgattctctgcctcgccgcctgtgagctggccggcggggaagcgacacaggccctgcccacggcggtggcgctggaaatgatccacaccatgtcgttgattcacgacgacctgccggcgatggatgacgacgacctgcgccgtggtcgtcccaccaaccacaaggtgtacggcgaagccgtggccatccttgctggggatgccctgttgacccgcgccttcgaaatggtggcgctgcgcagtccgggtgtgccggctgagcggttgctcaaggtggtgggagaactctcgttggtggctggcgccccgggcctggtgggcggccaggtggtggatctggaaagcgagggcaaggaggtggatcttgaaaccctcgagtacatccacctccacaaaaccggagccctgttgagcgcttgtgtaatcaccggggcgatgatcggcggggctgatgaggcgctgatcaaggctctgcgcacctatgccagggggatcggcctcgccttccagatcatcgacgacatcctcgacatcactgccagcagcgaggttctgggcaaaaccgccggcaaggacctcatcgccgacaagaccacctatcccaagcttctggggcttgatgagtcccgccgccgggccgatgcgttggtgaacgaagcgaaagaatcgcttcaaccctgggccgagaaggccgtgcccctgctggcgttggccgacttcatcaccagccgcgaccgatga

SEQ ID NO: 6218 - protein, 296 aa, Synechococcus sp. CC9605
MSAEFDFKAYLGKAKEQVEAALDGSLGPERPESLREAMRYSLLAGGKRLRPILCLAACELAGGEATQALPTAVALEMIHTMSLIHDDLPAMDDDDLRRGRPTNHKVYGEAVAILAGDALLTRAFEMVALRSPGVPAERLLKVVGELSLVAGAPGLVGGQVVDLESEGKEVDLETLEYIHLHKTGALLSACVITGAMIGGADEALIKALRTYARGIGLAFQIIDDILDITASSEVLGKTAGKDLIADKTTYPKLLGLDESRRRADALVNEAKESLQPWAEKAVPLLALADFITSRDR

SEQ ID NO: 6219 - DNA, 894 bp, Geobacter metallireducens GS-15
  CDS (1)..(894): transl_table=11
atggaccttaaaaactatctcaaagaacgctgtgccattgttgatgaagctcttgaacgctccctgcccggtgagggggaccttcccgtttccgttcatcgcgccatgcgctattcggttttcgcaggggggaaacggattcggccggttctgatgctcgccgcctgtgaggcggtgggaggaactccggacttggcgcttcccgctgcgtgcgccatggagatgatccacacctattccctcatccacgacgatctccccgcaatggacgacgacgatttccgccgcggacgtcccacaaaccacaaggttttcggcgaggcaatcgccatccttgccggtgatgcgctccttacggaagcgttcatcctcatgagctctcccgaatacgccgcaaaggccggacatgcccgtattcttccggttatccacgagattggcatctgtgccggttcccgggggatggtcggcggccaagtagtcgacatggagagcgaggggaaaaaggatatcgatctggccacggtccagtacatacacacccacaagaccggcgccctcatgaaggcttcggtcaaggcgggcgcaatactcggcggagcggaaggggacgcccttgcggccatgacccgttacggcgaggccatcggccttgcgttccagattgccgatgacatccttgacatcgagggtaccaccgagcagatcggcaaggatgcggggagcgacgaagcccgggggaaagccacctatccggcggtcatggggcttgccgattccaaacgccgcgcccaggagttggtggatctggccctcgaagccctttcccccttcggcgagaaagcggaacccctgcgggagatcgcccgttacatcgtatcccggaaatcgtaa

SEQ ID NO: 6220 - protein, 297 aa, Geobacter metallireducens GS-15
MDLKNYLKERCAIVDEALERSLPGEGDLPVSVHRAMRYSVFAGGKRIRPVLMLAACEAVGGTPDLALPAACAMEMIHTYSLIHDDLPAMDDDDFRRGRPTNHKVFGEAIAILAGDALLTEAFILMSSPEYAAKAGHARILPVIHEIGICAGSRGMVGGQVVDMESEGKKDIDLATVQYIHTHKTGALMKASVKAGAILGGAEGDALAAMTRYGEAIGLAFQIADDILDIEGTTEQIGKDAGSDEARGKATYPAVMGLADSKRRAQELVDLALEALSPFGEKAEPLREIARYIVSRKS

SEQ ID NO: 6221 - DNA, 915 bp, Desulfovibrio desulfuricans G20
  CDS (1)..(915): transl_table=11
atgtctcatgcggacgaaatgacaccgcaggccatgaagcagcggcttgcggcggaagcgctggaagtggaagcgtatcttggcgggtgccttaaagggcggggaataccctgtgatcttctgaaggccatggattacagcctgcttgccggcggtaagcgtctgcgacccgtgctgtgccttaccacggccggtcttttcggtctggcgcgcgatgcggtgctgccttttgccgcggccatcgagcttattcatacatattctctggtgcacgacgacctgcccgccatggatgatgacgacctgcggcgcggcatgccatcgaatcataaaaaattcggcgaggccacagccatactggccggtgacggcctgcttaccgaagcgttttgcctgatggcatcggcgggagctgctgtggaagcctccagagtgctttccgccctgtctgtggtggctgctgcggcaggcgccggaggcatggtgggaggtcagatgctggatatggagtacaccggccgcgctgatgtgtctttggacatgcttcgcggtatgcacgccatgaaaacaggtgcgctcatccgctgttcgtgtcttgccggagccctgcttgcaggcgcaccgcatgaagatgccgaacggatatcccactatggagaagccattggagccgcttttcagattgttgatgacattcttgatgaaaccggcgacgaggcgacactgggcaagccggtgggcagtgacagcgggcagggcaagaacacatatccgagcctgctggggcttgagcgcagcagagagctggcgcagcagcaggtggatgccgccgtggcctgcctgtcggggtatgaaggtgaaaatgcgcttttcctcagggcacttgcacagtacattgccgatcgggccatgtga

SEQ ID NO: 6222 - protein, 304 aa, Desulfovibrio desulfuricans G20
MSHADEMTPQAMKQRLAAEALEVEAYLGGCLKGRGIPCDLLKAMDYSLLAGGKRLRPVLCLTTAGLFGLARDAVLPFAAAIELIHTYSLVHDDLPAMDDDDLRRGMPSNHKKFGEATAILAGDGLLTEAFCLMASAGAAVEASRVLSALSVVAAAAGAGGMVGGQMLDMEYTGRADVSLDMLRGMHAMKTGALIRCSCLAGALLAGAPHEDAERISHYGEAIGAAFQIVDDILDETGDEATLGKPVGSDSGQGKNTYPSLLGLERSRELAQQQVDAAVACLSGYEGENALFLRALAQYIADRAM

SEQ ID NO: 6223 - DNA, 906 bp, Synechococcus elongatus PCC 7942
  CDS (1)..(906): transl_table=11
atggtcgcctcttcatcgcttcgcttcgatctcaaaagctacttaaaggagcggcagcgccaagttgaggcagctctaaatgcgatcttgccaccccaagatccaccgttgatctacgagtcgatgcgctattccctgctggcagaaggcaagcggctacggcccattctttgcctcgccagttgcgaactagcgggtggaacggctgcgatcgccctaccgacagcctgtgccttggagatggtgcacaccatgtccctgatccacgacgacctgccgtcgatggacaacgatgattttcggcgcggtcgacccaccaatcacaaggtttacggcgaagacatcgccattctggccggtgatgcactgctgacttacgcctttgaagcgatcgcccgtcacacgcccgaagtgcctgccgatcgcgtcctcaaggtgattgccgccttagcacgagccgttggagccgaagggcttgttggcgggcaagtggtggatctgcaatccgagggacgggatgacgtcaacctcgaaaccctgcactacatccacacccacaaaacgggtgcgctcttggaagtctctgtggtttctggtgccattctggccggcgcaagcgaagagctccaagagcagctgcgcacctatgctcaaaaaattggtctggctttccaagtgatcgacgacatcttggacatcacagcaacggccgaagaactgggtaaaacggcgggcaaggatctggctgcgaaaaaagcaacctaccccagcctgctcggtctggacgcatctcgcgagtatgccgatcagctgattaccgaagcgaaagcagcgatcgcagcctttggtgccgaagccgatccactgcgggcgatcgctgactacattacggcacggaaacactga

SEQ ID NO: 6224 - protein, 301 aa, Synechococcus elongatus PCC 7942
MVASSSLRFDLKSYLKERQRQVEAALNAILPPQDPPLIYESMRYSLLAEGKRLRPILCLASCELAGGTAAIALPTACALEMVHTMSLIHDDLPSMDNDDFRRGRPTNHKVYGEDIAILAGDALLTYAFEAIARHTPEVPADRVLKVIAALARAVGAEGLVGGQVVDLQSEGRDDVNLETLHYIHTHKTGALLEVSVVSGAILAGASEELQEQLRTYAQKIGLAFQVIDDILDITATAEELGKTAGKDLAAKKATYPSLLGLDASREYADQLITEAKAAIAAFGAEADPLRAIADYITARKH

SEQ ID NO: 6225 - DNA, 918 bp, Rhodospirillum rubrum ATCC 11170
  CDS (1)..(918): transl_table=11
gtgggggaccttgggaccgtgagtcatctcaacgaagtcatggccgccgaagcgctggccatcaacgatcacctgtcgcaactgatgccggcgacggacggccccgaggggcgggtcgtcgacgccatgcgctacgccgcccttgagggcggcaagcgtctgcggccgtttctggtcttgcagtcggcgcagttgttttcggtgtcgcgggcctgcgcgctgaatgtcgccgccgccatcgaaatgatccactgctactcgctgatccacgacgacctgccggcgatggataacgatgatctgcgccggggccgccccaccgtccatcggcaatacgacgagccgaccgccatcctggccggcgacgccctgttgaccaaggccttcgaggtcatcgccctgcccggcacccattccgatccggcggtgcgctgcgacttggtcacggagctggcgatcgccgccggcgccaagggcatggtcggcggtcagatgatcgatctgatggccgaacgcggcctgatcgacggcgcgctcgacgttccggcgatcacccgcatgcaccagctcaagactgggcggctgatcagcttctcctcgatcgccggggcgatcctgggcaaggcgccgcgctcgcagcgtcaggccctgttcaattacgcccatgatctgggtctggccttccagatcgccgacgacctgctcgatgtggagggcgataccgccaccctgggcaagaccgccggcaaggacgaggcctcgggcaaatccaccttcgtttccctgcttggcctcgagcgcgcccgcgatcaggccgacatgctggccgaacaggccgtcaatcaccttgacgccttcgacgagaaggccgacctgctgcgcgccgttgcccgtttcgtcgtcgaccgcaaaagctga

SEQ ID NO: 6226 - protein, 305 aa, Rhodospirillum rubrum ATCC 11170
MGDLGTVSHLNEVMAAEALAINDHLSQLMPATDGPEGRVVDAMRYAALEGGKRLRPFLVLQSAQLFSVSRACALNVAAAIEMIHCYSLIHDDLPAMDNDDLRRGRPTVHRQYDEPTAILAGDALLTKAFEVIALPGTHSDPAVRCDLVTELAIAAGAKGMVGGQMIDLMAERGLIDGALDVPAITRMHQLKTGRLISFSSIAGAILGKAPRSQRQALFNYAHDLGLAFQIADDLLDVEGDTATLGKTAGKDEASGKSTFVSLLGLERARDQADMLAEQAVNHLDAFDEKADLLRAVARFVVDRKS

SEQ ID NO: 6227 - DNA, 894 bp, Moorella thermoacetica ATCC 39073
  CDS (1)..(894): transl_table=11
gtgaaaaccacggaacttgaaagctacctggctgaacggcggcaactggtccaggaggccctggcccgcaacctgccacctccggacacctacccgccggcggtgcaccaggccatgcactacagcctttttgccgggggtaaaaggctaaggcctatcctcgtcctggctgccggcgaagccgtgggcagccagccggagcccttattaccggcagcctgcgccgtggaatttatccacacctattcccttatccacgatgacctgccggcgatggataatgacgattaccgccgcggccggccgacatgccataaagtctacggtgaagctatcgccctgctggccggtgatgccctcctgaccctagcttttgaagtcttgagcaggataccggcgaccataccgccggagagaattctccgggcaaccagggagctggctgcctccgccggtagccaggggcttataggcggccaggtggtggatatggaggccgaagggcagccggttactttagaaaaggtaaactacattcataaccataaaaccggtagcctgatccgggcctgcctgcgcctggggggcatcctgggaggcgcgggagaggaacaactggccttactgacccgttacggggaagccctgggcctggccttccagataaccgacgacattctggatattaccggcgatttcagccagacgggcaagcagggcggggtggatgccgcccggggcaaggcgacctacccggcctgcctgggggtggaggcctcccggcaaaaggccggggaattatgcgctgaggcaggagccttggccagggccctgggaccggcggccgaacccctggaactcctggcaggctttgtcctaaggcggcaaggctga

SEQ ID NO: 6228 - protein, 297 aa, Moorella thermoacetica ATCC 39073
MKTTELESYLAERRQLVQEALARNLPPPDTYPPAVHQAMHYSLFAGGKRLRPILVLAAGEAVGSQPEPLLPAACAVEFIHTYSLIHDDLPAMDNDDYRRGRPTCHKVYGEAIALLAGDALLTLAFEVLSRIPATIPPERILRATRELAASAGSQGLIGGQVVDMEAEGQPVTLEKVNYIHNHKTGSLIRACLRLGGILGGAGEEQLALLTRYGEALGLAFQITDDILDITGDFSQTGKQGGVDAARGKATYPACLGVEASRQKAGELCAEAGALARALGPAAEPLELLAGFVLRRQG

SEQ ID NO: 6229 - DNA, 885 bp, Burkholderia thailandensis E264
  CDS (1)..(885): transl_table=11
atgacattcgaccaatggatgcgctcggtgctcgagcgtgtcgagacggccctcggccattatttgccggctgagactgtggcgcccgcgcaactgcacgaggcgatgcgttatgcggtgctcgggggcggcaaacgggtgcgtccgctgctgtgccatgcggcgggcgagctcacgggcgcgtcggaggcggcgctgaacgccgcgtcgtcggcgctcgagatgattcacgtatattcgctcgtgcacgacgacatgccgtgcatggacgacgatgcgctgcgtcgcggcaagccgaccgtccacgtcaagtacgacgagccgaccgcgctcctcgtcggcgacgcgctgcagtcacaggccttcgtcgcgctgaccgacgccgccgcgctgccggccgaccggcaggccgcgctcgtgcgcgagctggcgctcgcgagcggctcgatcggcatggcgggcggtcaggcgatcgatctcgcgagcgtcggcgtcgcgctcacgcgcgacgcgctggagacgatgcaccggatgaagacgggcgcgctgttgcgcgcgtccgtgcgcatgggcgcgcttgcgggcgagacgccgtccgacgacgcgatgcgcgcgctcgacgcctatgcggcggctgtcggcctcgcgttccaggtggtggacgacattctcgacgtcaccaccgattccgcgacgctcggcaagacggccggcaaggacgcggcgaacgacaagccgacctacgtgtcgatcatcggtctcgacgcgtcgcgcgcgcttgccgcgcgactgcgcgccgacgcgcacgccgcgctccagccgttcggcgcgcgcgcgcagcgcctggccgaactggcggacctggtggtgaaccgggtcagctga

SEQ ID NO: 6230 - protein, 294 aa, Burkholderia thailandensis E264
MTFDQWMRSVLERVETALGHYLPAETVAPAQLHEAMRYAVLGGGKRVRPLLCHAAGELTGASEAALNAASSALEMIHVYSLVHDDMPCMDDDALRRGKPTVHVKYDEPTALLVGDALQSQAFVALTDAAALPADRQAALVRELALASGSIGMAGGQAIDLASVGVALTRDALETMHRMKTGALLRASVRMGALAGETPSDDAMRALDAYAAAVGLAFQVVDDILDVTTDSATLGKTAGKDAANDKPTYVSIIGLDASRALAARLRADAHAALQPFGARAQRLAELADLVVNRVS

SEQ ID NO: 6231 - DNA, 927 bp, Syntrophus aciditrophicus SB
  CDS (1)..(927): transl_table=11
atggagagaaaaatgaatcctgaatccgggctggatctgaatgcctacatcaaggaaaaaaagctgcggatcgatgaagccatcgaccgctacctgcccggcgaggaggaatccccgggtgaactttttaaagcgatgcggtacagcctttttgcaggcgggaagaggatccgtcccattctctgtcttgcggctgcagaagctgttggaacttcagtctcttccgattgccttcttccggtggcctgcgccctcgaatacatccatacctattcattgattcatgacgatcttcccgccatggacaatgacgactaccgccggggaaagcccaccagccacaaggttttcggtgatgctctggccattctcgccggggacgctctgctcacggaggcctttgaactgatgacccgaaccgattttcataccggcctggccccggaaattctcctgagagtcatcagggaaatcgctgctgctgccggggctttcggcatggtgggaggacaggtggaagatttgcgtgcggaaggaaaacccggaaatctggacacgctgaaccgaattcataatcggaaaacaggggcaatgatcgtcgtttcccttagagcaggggcgatactttccggaggatcggagcaggccgtttcggcattgacagattacggccacaagatcggcctggttttccagattgccgacgacattctcaacgtggagggagaccggactgtgctgggtaaaagcacggggagtgacgcgagccgtggtaaaatgaccttccctctccttatgggattggaaccatcccgtcagaaggcctttgccctggttgaggaggctctgcgcgatcttgacggttttgacaaccgggcgactcctctgcggctgatggccagatattttgtggagcgccgactttaa

SEQ ID NO: 6232 - protein, 308 aa, Syntrophus aciditrophicus SB
MERKMNPESGLDLNAYIKEKKLRIDEAIDRYLPGEEESPGELFKAMRYSLFAGGKRIRPILCLAAAEAVGTSVSSDCLLPVACALEYIHTYSLIHDDLPAMDNDDYRRGKPTSHKVFGDALAILAGDALLTEAFELMTRTDFHTGLAPEILLRVIREIAAAAGAFGMVGGQVEDLRAEGKPGNLDTLNRIHNRKTGAMIVVSLRAGAILSGGSEQAVSALTDYGHKIGLVFQIADDILNVEGDRTVLGKSTGSDASRGKMTFPLLMGLEPSRQKAFALVEEALRDLDGFDNRATPLRLMARYFVERRL

SEQ ID NO: 6233 - DNA, 882 bp, Staphylococcus aureus subsp. aureus NCTC 8325
  CDS (1)..(882): transl_table=11
atgacgaatctaccgatgaataaattaatagatgaagtcaataatgaattatcggttgcgataaataaatcagtaatggatactcagctagaagaaagtatgttgtattcattaaatgctggaggtaaacgcatccgaccagttctgttattactcactttagattcactaaataccgagtatgagttaggtatgaagagcgcaattgcactagaaatgattcatacatattcacttattcatgatgacctaccagcgatggataatgatgattatcgacgaggaaaattaacaaatcataaagtatatggtgagtggactgcgatattagcaggtgatgctttattaactaaagcatttgaacttatttcaagtgatgatagattaactgatgaagtaaaaataaaagttctacaacggctgtcaatagcaagtggtcatgttggaatggtcggcggtcaaatgttagatatgcaaagcgaaggccaaccaattgatcttgaaactttggaaatgatacacaaaacaaaaacaggagcattattaacttttgcggttatgagtgcagcagatatcgctaatgtcgatgatacaactaaagaacatttagaaagttatagttatcatttaggtatgatgttccagattaaagatgatttattagactgctatggtgatgaagcaaagttaggtaaaaaagtgggcagcgatcttgaaaataataaaagtacgtacgtgagtttattagggaaagatggcgcagaagataaattgacttatcatagagacgcagcagtggatgaactaacgcaaattgatgaacaattcaatacaaaacacttattagaaatcgttgatttattttatagcagggatcactaa

SEQ ID NO: 6234 - protein, 293 aa, Staphylococcus aureus subsp. aureus NCTC 8325
MTNLPMNKLIDEVNNELSVAINKSVMDTQLEESMLYSLNAGGKRIRPVLLLLTLDSLNTEYELGMKSAIALEMIHTYSLIHDDLPAMDNDDYRRGKLTNHKVYGEWTAILAGDALLTKAFELISSDDRLTDEVKIKVLQRLSIASGHVGMVGGQMLDMQSEGQPIDLETLEMIHKTKTGALLTFAVMSAADIANVDDTTKEHLESYSYHLGMMFQIKDDLLDCYGDEAKLGKKVGSDLENNKSTYVSLLGKDGAEDKLTYHRDAAVDELTQIDEQFNTKHLLEIVDLFYSRDH

SEQ ID NO: 6235 - DNA, 870 bp, Desulfitobacterium hafniense Y51
  CDS (1)..(870): transl_table=11
atgtttcaaaaggaattagaagattatgctcgcttagtggattcgtatttggcacaatttccttggccaaccggcacccttgctgaaagcatgaactattctctttccgcagggggtaaacgcatccgccctgttctggctctggccgcggcccatgctgtgggaggggactgtgaagacatccttccggcggtctgtgctttggagctgatacatacctattcattaatccatgatgatcttcctgccatggacaatgatgattaccggcgggggcgtttggccaatcataaagtttttggagaagggcaggccattctggccggtgatgctcttttaacctatgcttttgagctgattgcgcagcctatgagcggagtagagccgcagcgccagctgcgggcgattagggaagttgcccaagcagcggggccggagggaatggtcggcggtcagatgctggatttggaagctgaagaaaagcagttaaaccttgctgagctggagcaggtccatcgtctgaaaaccggagcgatattggtggttgccgcccgtttaggggcaattctcgccggaggaacggaagagaagatcgaagcgttgaccagctatgctcaagccatcggtctggctttccagattaaggacgatattcttgatctggaaagtgatagcgagaccttaggcaagcctgtacatagcgatctccgccagcataaatccacttatccctctttaatgggtttggcaggcgctaagctggaattgaagataaagaccgatgaagctcatgccgccttggcggttttaggagagcgggcgggtttcctgcatgaattggctgattatatagctcaacggaagtattga

SEQ ID NO: 6236 - protein, 289 aa, Desulfitobacterium hafniense Y51
MFQKELEDYARLVDSYLAQFPWPTGTLAESMNYSLSAGGKRIRPVLALAAAHAVGGDCEDILPAVCALELIHTYSLIHDDLPAMDNDDYRRGRLANHKVFGEGQAILAGDALLTYAFELIAQPMSGVEPQRQLRAIREVAQAAGPEGMVGGQMLDLEAEEKQLNLAELEQVHRLKTGAILVVAARLGAILAGGTEEKIEALTSYAQAIGLAFQIKDDILDLESDSETLGKPVHSDLRQHKSTYPSLMGLAGAKLELKIKTDEAHAALAVLGERAGFLHELADYIAQRKY

SEQ ID NO: 6237 - DNA, 888 bp, Saccharophagus degradans 2-40
  CDS (1)..(888): transl_table=11
atgagcacagaattgacccactttcttgccaagtaccgcgagcacactaacggtttgctagaagaacgcttaatcggcctaaagcactacaacaccgacctaatagaagccatgcgctacagcttattgctgggcggtaaacgtgtacgccccgtattagtgtatgccgcagcctacgcaactggcggcatatctgcggccgccgacgattgcgcctgcgcaatagaggccattcacacctatagccttattcacgacgatttaccggcaatggatgacgacgcattgcgccgaggccaacccacctgtcatattgcctacagtgaggcaacagctatactcgcgggtgacgcgctacagtgccaagcttttgaatggctagcgaatagccagcacatgcctgcaagcgctgcattacaggcaattgccgcacttgcgaaggcctctggcgctagcggcatggttttggggcaagctatcgatcttgccgcggttgataaaagcgtagatttgcaacacttagaaaccatgcaccagcacaaaacaggcgcactcatcagcgcaagcgtagaaatgggcgcgattgccgccggtgctacccccacccaaaccgcgcaattacgccaatatgccagcgccattggcttggcgtttcaggtgcaagacgacatactcgacgttaccgccaatacagccacattgggcaaagaagctggcgccgatgcagagcgcaacaagccaacttatgtatcactccttggtttagatggcgccaaacataaggcgagcgaacttttgcagcaggctttggcgtcgatcaaagattttgacgagcgagcggatatactacgccagttggcgacatatattgtgcagcgcgaccattaa

SEQ ID NO: 6238 - protein, 295 aa, Saccharophagus degradans 2-40
MSTELTHFLAKYREHTNGLLEERLIGLKHYNTDLIEAMRYSLLLGGKRVRPVLVYAAAYATGGISAAADDCACAIEAIHTYSLIHDDLPAMDDDALRRGQPTCHIAYSEATAILAGDALQCQAFEWLANSQHMPASAALQAIAALAKASGASGMVLGQAIDLAAVDKSVDLQHLETMHQHKTGALISASVEMGAIAAGATPTQTAQLRQYASAIGLAFQVQDDILDVTANTATLGKEAGADAERNKPTYVSLLGLDGAKHKASELLQQALASIKDFDERADILRQLATYIVQRDH

SEQ ID NO: 6239 - DNA, 891 bp, Methylobacillus flagellatus KT
  CDS (1)..(891): transl_table=11
atgaccgatttccagagctgggcccgccatacccaacaacgtatggaacacacgctggacaacttgcttccagcatcgtacattgcccccacccgcctgcatgaggccatgcgctatgccgtgctgggcggcggcaagcgtgtacgcgcactgcttgcacatgctgctggcgaactctgtggtgccgcccccgaaaaagtggatattgccgctgctgcggtggagctgatccatgcctattccctcgtgcatgacgacatgccgtgcatggacgacgacgacctgcgccgcggcaagccatcctgtcacaagcaatatgacgacgctacggcgctgctggtcggcgatgccttgcagaccctcgcctttcagtccctggcgacgcccggtttgtgtacggaccccggcaggcagctggaaatggtcagtctcctggccatcgccagtggctcacgcggcatggcgggagggcaggccatcgaccttgacagcgtcggcaaggcacttgagcagtccgagctggaatacatgcatatccataaaacaggtgccctgatccgagcagcggccctgctcggcgcacactgcgccaatgatctggaccaggagcggttacatgcgatagatcattacgcccaggccatcggccttgccttccaagtggtggacgatatccttgacgcagaagccgacagtgagaccctgggcaaaacagcgggcaaggatgcccaaagcgacaagccgacttatgtcaccatcctgggcatcgaccatgccaaacagctagcaaaggaactgctggatggcgcgcttgcccagctggcaccttttggcgaagccgcccaccgcttagagcaggtggcgcacttcatcactcaacgtagcttttaa

SEQ ID NO: 6240 - protein, 296 aa, Methylobacillus flagellatus KT
MTDFQSWARHTQQRMEHTLDNLLPASYIAPTRLHEAMRYAVLGGGKRVRALLAHAAGELCGAAPEKVDIAAAAVELIHAYSLVHDDMPCMDDDDLRRGKPSCHKQYDDATALLVGDALQTLAFQSLATPGLCTDPGRQLEMVSLLAIASGSRGMAGGQAIDLDSVGKALEQSELEYMHIHKTGALIRAAALLGAHCANDLDQERLHAIDHYAQAIGLAFQVVDDILDAEADSETLGKTAGKDAQSDKPTYVTILGIDHAKQLAKELLDGALAQLAPFGEAAHRLEQVAHFITQRSF

SEQ ID NO: 6241 - DNA, 882 bp, Burkholderia xenovorans LB400
  CDS (1)..(882): transl_table=11
atgacattcgaacaatggatgcgctcggtgctggagcgcgtcgaaacggcactagaccattatctgccgggcgaggccaccgagcccgccacgctgcatgaagccatgcgctacgcggtgctgggcggcggcaagcgggttcgcccgctgctgtgccacgcggctggcgaactgaccggcgcgcgtgccgaatgcctcgatgcggcagccgctgcgctggaaatgatccacgtgtactcgcttgtccacgacgacatgccatgcatggacgacgacgcgctgcgtcgcggcaagcccacggtacacgtcaagtatgacgaagccacggcattgctggtcggcgacgcgctgcaatcgcaggcgttcgtcgcgctgacctcggacgtgctcgctccggcgcaacaggccgcgctcgtgcgcgaactggcgctggcgagcggctcggtcggcatgtgcggcggccaggccatcgacctggcgagcgtcggccacacgctgacgcgcacgcagctcgaaaccatgcaccgcatgaaaaccggtgccttgctgcgcgccgcggtgcgcatgggcgcgctggctggcgaaacgccggacgcagcggccatgcgctcgctcgacgcatattcggctgctgtcggcctcgcgtttcaggttgtcgacgacattctcgacgtcacgaccgattccgccacgctcggcaaaaccgcaggtaaagacgcgaaggacggcaagccgacctacgtgtcgatcattggactcgacgcgtcgcgtgcgctcgcagcgcaactgcgcagtgacgctcacgccgcgctggcgccgttcggcgcacgcgcgcagcgtcttgccgaattggccgatctggtggtgaaccgggtcagctga

SEQ ID NO: 6242 - protein, 293 aa, Burkholderia xenovorans LB400
MTFEQWMRSVLERVETALDHYLPGEATEPATLHEAMRYAVLGGGKRVRPLLCHAAGELTGARAECLDAAAAALEMIHVYSLVHDDMPCMDDDALRRGKPTVHVKYDEATALLVGDALQSQAFVALTSDVLAPAQQAALVRELALASGSVGMCGGQAIDLASVGHTLTRTQLETMHRMKTGALLRAAVRMGALAGETPDAAAMRSLDAYSAAVGLAFQVVDDILDVTTDSATLGKTAGKDAKDGKPTYVSIIGLDASRALAAQLRSDAHAALAPFGARAQRLAELADLVVNRVS

SEQ ID NO: 6243 - DNA, 885 bp, Ralstonia metallidurans CH34
  CDS (1)..(885): transl_table=11
atgagcgatttcgccacttggatgcgggcgcagggcgcccgcaccgaagccgctttggaagcggccctaccttccacggacacaattccatacaccctccatgaggcgatgcgctatgctgtgctcggcggtggcaagcgtgtgcgccccctgttagtgcacgctgcgggcgaggtggtcggtgcgacacccgaggcctgcgacgccgcagcatgcgccgtcgagatgattcacgcctattcgctggtccacgacgacatgccctgcatggacgacgacgatctgcgccgcggacgccccacggtccacaaggcctatgacgaggccacggccctgctggtcggtgacgcgctgcagagccaggcgtttatcgtgctggcccagaccccggctctggctgcggaagcgcgcctgaaagtggtggcggaactggccgtggcatcgggctcgataggcatgtgcggtggacaagccatcgacctccagaacgttggcaaggccatgacccgcgaggcgctcgaaggcatgcaccgcatgaagaccggcgccctgttgcgcgccagcgtgcgcatgggtgcgttgtgcggaaacatcgaccaggccggccttgtggcgcttgatcgatatgccgcggccgtgggattggcgttccaggtcgtggacgatattctcgacgtcactgccgacacggcaacgcttggcaagacggcgggcaaggatgccgcgaacgacaagccgacctacgtatcgctgcttggcctggatgccgcacgcgagctggctgcccagcttcgcaccgacgcccacgaggcgctggagggattcggcacacgcgctggccggctcgccgaactggccgacctgatcgtgctgcgctcaaactga

SEQ ID NO: 6244 - protein, 294 aa, Ralstonia metallidurans CH34
MSDFATWMRAQGARTEAALEAALPSTDTIPYTLHEAMRYAVLGGGKRVRPLLVHAAGEVVGATPEACDAAACAVEMIHAYSLVHDDMPCMDDDDLRRGRPTVHKAYDEATALLVGDALQSQAFIVLAQTPALAAEARLKVVAELAVASGSIGMCGGQAIDLQNVGKAMTREALEGMHRMKTGALLRASVRMGALCGNIDQAGLVALDRYAAAVGLAFQVVDDILDVTADTATLGKTAGKDAANDKPTYVSLLGLDAARELAAQLRTDAHEALEGFGTRAGRLAELADLIVLRSN

SEQ ID NO: 6245 - DNA, 948 bp, Acidobacteria bacterium Ellin345
  CDS (1)..(948): transl_table=11
atggcacagacatacgcatgcactcaggcgcgattctctgtatccgattgttatacttcttgtttcatgctgaaagaaactctcgaacaggggcgcattctcgccgacgcagctctcgagcggcttttgccgccgggaacgcagcggccgccgagcattcaccaggcgatgcgccatagcgtttttgccgggggcaagcggctgcggcccatcctggtgatggaagcagcgcgcatgattaccggctcgctgcccgatggcgtggacgaactcggcgccgctctcgagatgctccacacctactcgctcattcacgacgacctgcccgcgctcgacaacgacgacctgcgccgcggccgcccgacctgccacgtggcgttcggcgaagccaccgcgatcctcgccggcgacgcgctccagacttacgcctacgaagtgatggcacgcctgcgcacgacggcagaagccagggtccagatcatcgaagaagtcgcgcacgccaccggcaccatcgacggcatgatcggcggccaggtcctcgacctcgaagccgagcacacccacgccgatgctgccacggtggaatacatccaccgctcgaagaccggtgcgctgattactgcaagcgtggtcgcgggcggactttatgccggcgctgacaaagcccaagtccagcgcatccgcgagtttgggaagtcggcggggttggcgttccagatcgtggatgatgtgctcgacgtaacgcagacctcagagcagttgggcaaaaccgccggcaaagatacgaagtcggagaaatccacttggccgtcgttgtatggcgtcgacaagtcgctggagatggccgacgagctggtgtacacagcgaacaaacgccttgatagcttcggcgagcgcgcgacgacgttaaaggaattggcgaagtttctggtggaacgaaagaagtaa

SEQ ID NO: 6246 - protein, 315 aa, Acidobacteria bacterium Ellin345
MAQTYACTQARFSVSDCYTSCFMLKETLEQGRILADAALERLLPPGTQRPPSIHQAMRHSVFAGGKRLRPILVMEAARMITGSLPDGVDELGAALEMLHTYSLIHDDLPALDNDDLRRGRPTCHVAFGEATAILAGDALQTYAYEVMARLRTTAEARVQIIEEVAHATGTIDGMIGGQVLDLEAEHTHADAATVEYIHRSKTGALITASVVAGGLYAGADKAQVQRIREFGKSAGLAFQIVDDVLDVTQTSEQLGKTAGKDTKSEKSTWPSLYGVDKSLEMADELVYTANKRLDSFGERATTLKELAKFLVERKK

SEQ ID NO: 6247 - DNA, 894 bp, Myxococcus xanthus DK 1622
  CDS (1)..(894): transl_table=11
gtggcaacgtttcaactgaactccttcctggccgctcagcaggcgcgcgtcgaggccctgctgaacgagcgcgtggcgcggctcgggccttccgggacgccgccgcagctcgcggaggccatgcgctactccctgctggccggcggcaagcgcctgcgcccggtgctctgcctggccttcgcggacctcgtggcgcgcggaagcgccgtatcggcggtggcgggcgacgcggcgtgcgcgctggagtacgtgcacacgtactcgctggtgcatgacgacctgccggcgatggacaacgacgactaccgccggggccggctcaccaaccacaaggtgtacggcgaggccatggccatcctggcgggtgacgcgctgttgacggaggccttcacgctggtggccagtgggccggagagcatgcgcgccgcgctgtgccgggagctggcggtggcctcgggcgcggcgggcatggtgggcgggcaggtgctggacaccgccgaggaccggccgtccgcgctggactacctcatccggatgcaccgcatgaagacgggcgccctcatccgggccgcgtgccgcatgggcgtgctggccagcggtggagacgcggacgcattggcgcgcgcggacacctacggtgacgcggtggggctggccttccagattgccgatgacgtgctggacgtgacggccacggcggcggagctgggcaagcccgcgggcgcggacgccgcggccgggcgcttcaccttcccggcggtggtgggcctggaggcgtcgcggacgctggcggaccagaaggtggccgaggccatcgcggccgtacgccctctggaaggcgaggacgggccgctggcggcgttggcgcgctacacggtggagcggaagtcctaa

SEQ ID NO: 6248 - protein, 297 aa, Myxococcus xanthus DK 1622
MATFQLNSFLAAQQARVEALLNERVARLGPSGTPPQLAEAMRYSLLAGGKRLRPVLCLAFADLVARGSAVSAVAGDAACALEYVHTYSLVHDDLPAMDNDDYRRGRLTNHKVYGEAMAILAGDALLTEAFTLVASGPESMRAALCRELAVASGAAGMVGGQVLDTAEDRPSALDYLIRMHRMKTGALIRAACRMGVLASGGDADALARADTYGDAVGLAFQIADDVLDVTATAAELGKPAGADAAAGRFTFPAVVGLEASRTLADQKVAEAIAAVRPLEGEDGPLAALARYTVERKS

SEQ ID NO: 6249 - DNA, 900 bp, Rubrobacter xylanophilus DSM 9941
  CDS (1)..(900): transl_table=11
gtgaggtcggcgagcccggccggggtcgagggctttctggccctgcgcgaggtcatcgaggagtacctggaggggctgcgcttcaccgaagagcccgccctcgagcggctgcaggaggcgatgcgctactcgctgcttgccgggggaaagcgcgtgaggcccctcctctgcatggagagcgccagcctcttcggcgctcccccggagagggtgctcccctccgccgccgccatagagctgatccatacgttctccctcatccacgacgaccttcccgcgatggacaacgacgacttccgcaggggcaagcccaccagccacaagaagttcggggaggcgatggccatcctggcgggcgacgccttcttcggggagtccctcgccctcatcaccgaccaccaggaggggagcgccgagcaggtgctcgcggtcgtccgggagctcgcccacgccaccgggctcgccgggctagcgggcggccaggcgctagacctggagcacaccggccgccgggcgggcccaaaggagctggagctcacccaccaccacaagaccggggccctcatccgggcctccgcccggataggcgccatcctggccggggcgggcgaggaggggctcgaggccatctcgcggtacgccacggagcttgggctgtgcttccagatagtggacgacgtgctggacgcggtgggcagcagcgagcggctgggcaagcgggccgggggggacgccgagcggggcaaggccacgtttgtgagcgtgtttgggctcgagggggccaggagggaggccgacgccgcctgcgagcgggcgctgcgggcgctcgggcgcctggaaggccgggacacctcgaggctcgaggccctggccctcttcgtacgcgacagggaccgctga

SEQ ID NO: 6250 - protein, 299 aa, Rubrobacter xylanophilus DSM 9941
MRSASPAGVEGFLALREVIEEYLEGLRFTEEPALERLQEAMRYSLLAGGKRVRPLLCMESASLFGAPPERVLPSAAAIELIHTFSLIHDDLPAMDNDDFRRGKPTSHKKFGEAMAILAGDAFFGESLALITDHQEGSAEQVLAVVRELAHATGLAGLAGGQALDLEHTGRRAGPKELELTHHHKTGALIRASARIGAILAGAGEEGLEAISRYATELGLCFQIVDDVLDAVGSSERLGKRAGGDAERGKATFVSVFGLEGARREADAACERALRALGRLEGRDTSRLEALALFVRDRDR

SEQ ID NO: 6251 - DNA, 951 bp, Trichodesmium erythraeum IMS101
  CDS (1)..(951): transl_table=11
atgatgctaatgccaaatactggcaatctaattaatcccatgctccctcaatttcaaatagatacaacttttgacctatctaactatttagtagagcgaaaagctctcgttgaaaaagctcttgacaattctatcaaaatagtttatccagagaaaatctatgaggcaatgcgctattctctattagcaggcggtaagcgcttacgtccaattttgtgtttagcgacctgtgaattatcaggtggaaatatagaaatggcaatgcctactgcctgtgcattggagatgatccataccatgtccttgatccatgatgatttaccctcaatggataatgatgactatcgccgaggccaacttacaaatcataaagtttatggtgaagatatcgcaattcttgcaggagatggtttattaagttacgcttttgagtttgtagtcactcaaactaagaatgtactaccaaaacaagttctacaagttattgctcggttgggaaaagcttccggagcagcaggcttagttggaggccaagtagtggacttagcttctgaaggtatttcacaggtatctgaaaaaaccctacattttatccatactcataaaacaggagctcttttagaagctagtgtagtctgtggagcaatacttgcggatgtgtcccaagctaatttatacagacttgaacgctatgctcaaaatattggtttggcttttcaaatagttgatgatattctcgatattactgctacaacagaagagctagggaaaactgctggaaaggatattgaagctaaaaaagcaacctacccggtcatttggggattagaaaaatctcggtttcaggctcaaaaactagttgaaaaggccaaggcagagttagaagtttttggagacaaagtaatgccactaatagccttagcagattttattatcagccgtagtaactag

SEQ ID NO: 6252 - protein, 316 aa, Trichodesmium erythraeum IMS101
MMLMPNTGNLINPMLPQFQIDTTFDLSNYLVERKALVEKALDNSIKIVYPEKIYEAMRYSLLAGGKRLRPILCLATCELSGGNIEMAMPTACALEMIHTMSLIHDDLPSMDNDDYRRGQLTNHKVYGEDIAILAGDGLLSYAFEFVVTQTKNVLPKQVLQVIARLGKASGAAGLVGGQVVDLASEGISQVSEKTLHFIHTHKTGALLEASVVCGAILADVSQANLYRLERYAQNIGLAFQIVDDILDITATTEELGKTAGKDIEAKKATYPVIWGLEKSRFQAQKLVEKAKAELEVFGDKVMPLIALADFIISRSN

SEQ ID NO: 6253 - DNA, 939 bp, Synechococcus sp. CC9311
  CDS (1)..(939): transl_table=11
atgtccgctgcggccactagccccgaaagcgtgccgtcctccggtgagctcctctccacgtttgactttgcgaattacctaaagctctcccgcgatcgtgtggagatagctctggatgcctcgatgggacctgagcgtcctgaatctttgcgtgatgcgatgcgctactcccttctggcagggggaaagcggttgcgcccgattttgtgcctagcggcttgtgaattagtcgggggatcgtccgagttagccatgccaacggcggtggcgctggaaatgatccacaccatgtcgttgattcacgacgacttgccggccatggacaacgatgacctgcgcagggggcgtcccaccaaccacaaggtgtatggagatgccatggccatccttgccggtgatgccatgctcagccgcgcttttgaaatggtggctgtccgcagtgcaaacgttcccgcggatcgcttgttgcgggttgttggtgaattggctcttgtatcgggagcgcctggcttggtcggaggtcaggttgttgatcttgagtccgaggggcaagccgttgatctcgagacccttgagtacatccatcttcacaagaccgcagccttgctgcgtgcctgtgttgtgacaggagctctgatcggaggagcgaatgacgaccaattgcaggcgatgcgcacctatgccaatggcattggtttggccttccagatcattgacgacatcctcgatgtaaccgccagcagtgaagtgctcggtaaaactgccggcaaggatctgcttgccgataaaacgacctatcccaagcttttgggacttgatgcttcgcgggagaaagcgttgcagttggtgcgggagtccaaggccgcgcttgaaccttggcgtgacaaagcggcgcccttgttggctctcgccgactatgtagcgagtcgggattgttga

SEQ ID NO: 6254 - protein, 312 aa, Synechococcus sp. CC9311
MSAAATSPESVPSSGELLSTFDFANYLKLSRDRVEIALDASMGPERPESLRDAMRYSLLAGGKRLRPILCLAACELVGGSSELAMPTAVALEMIHTMSLIHDDLPAMDNDDLRRGRPTNHKVYGDAMAILAGDAMLSRAFEMVAVRSANVPADRLLRVVGELALVSGAPGLVGGQVVDLESEGQAVDLETLEYIHLHKTAALLRACVVTGALIGGANDDQLQAMRTYANGIGLAFQIIDDILDVTASSEVLGKTAGKDLLADKTTYPKLLGLDASREKALQLVRESKAALEPWRDKAAPLLALADYVASRDC

SEQ ID NO: 6255 - DNA, 921 bp, Alkalilimnicola ehrlichei MLHE-1
  CDS (1)..(921): transl_table=11
atgaacaagccttcgaagatccggcacatcgcgacacttgaacgtgtcagccccacctggcgtgcccgggtggagcaggcgctggactactggttgccggaggcgcagacccaccccgcgcgcctgcaccaggccatgcgctattccgcgttgtccggcggcaagcggctgcgcccgatactggtttttgccaccgggcaggccctgggcgcggcccccaccctgctggacggccccgcctgcgcggtggagtgcatccacgcctactcgctcatccacgacgacctgccggccatggacgacgacgagctgcgccggggtcagcccacctgtcacaaggccttcgacgaggccaccgccattttggccggggacgcgctgcagacgctggcctttcacatcctggcccacgacccggggggggtgcagaacagccgcgcccggctgcggatggtcgaggtgctggcgctggccgccggctcccgcggtatggcgggggggcaggccatcgacctggccgccaccgggcagcaactggacgtggcccagctcgaggatatgcacatccacaagacgggcgccctgatccgggccagcgtgcagctcggcgccctggccgccagcccggtggacgaggagctgctccagcggctggaccattacggcaagtgcatcgggctcgccttccagatccgcgacgacatcctggatgtggagggcgagaccgaggccttgggcaaggcccggggctcggaccagcgccaggccaaggccacctaccccgccctgctgggcatgcgcgaggcccgcgagacggctgaccggctggtggaggacgccctggagtcgctggaggggctggaccagagcgccgatgtgctacgcggcattgccgaatactgcattggccggaaccactga

SEQ ID NO: 6256 - protein, 306 aa, Alkalilimnicola ehrlichei MLHE-1
MNKPSKIRHIATLERVSPTWRARVEQALDYWLPEAQTHPARLHQAMRYSALSGGKRLRPILVFATGQALGAAPTLLDGPACAVECIHAYSLIHDDLPAMDDDELRRGQPTCHKAFDEATAILAGDALQTLAFHILAHDPGGVQNSRARLRMVEVLALAAGSRGMAGGQAIDLAATGQQLDVAQLEDMHIHKTGALIRASVQLGALAASPVDEELLQRLDHYGKCIGLAFQIRDDILDVEGETEALGKARGSDQRQAKATYPALLGMREARETADRLVEDALESLEGLDQSADVLRGIAEYCIGRNH

SEQ ID NO: 6257 - DNA, 915 bp, Rhizobium leguminosarum bv. viciae 3841
  CDS (1)..(915): transl_table=11
atggacgcgaaccgggatactttcgagacaaggctgaagaacaacgcccgcgacatcgaggcgctgctcgacgcattgctttcaccgagtgccttttccgatgaaatcgccaggcccgagacgctgcgcgatgccatgcattatgccgtgttgaacggcggcaagcggctgcgcccgtttctggtcgtcgaaagtgccgcccttctcggcggcgacgccgaggcggcacttcgcgtcggcgccgcactcgaatgcgtccactgctactccctcgtgcatgacgacctgccggccatggacgatgacgacctgcgccgcggcaaaccgacagtacacatcaagttcgacgaagcgacggcgatcctcgccggcgacagcctgctgacctatgccttcgacatcatcgccgcgccggaaacgacccttgccgatacgagcaaggcatcgctggtgctggcccttgcccgcgcagccggtctcggcggcatggccggcggccaggcgcttgatctcgcggcggaaaagcaggcgcccgacgaggccggcatcatccgcctgcaggcgatgaaaacgggcgcgctgatccgcttcgcctgcgaagccggcgccgtcatctcgggaagcttggccgaagatcgccgccgcctgcgcgccttcggcgaaaagatcggtcttgctttccagcttgccgacgacattctcgacctgacttcggatgcagcgaccatgggcaaggcgaccggcaaggatgcggcccgcggcaagggaacactcgtcgccctgcgcggcatggaatgggccgagacccagctccgtgagcacgtccgcgatgccgaagcgctgcttgccccttacggcgcccgcgcctcgatcctcattgctgcagcgcatttcatcgccgaccggaagagctga

SEQ ID NO: 6258 - protein, 304 aa, Rhizobium leguminosarum bv. viciae 3841
MDANRDTFETRLKNNARDIEALLDALLSPSAFSDEIARPETLRDAMHYAVLNGGKRLRPFLVVESAALLGGDAEAALRVGAALECVHCYSLVHDDLPAMDDDDLRRGKPTVHIKFDEATAILAGDSLLTYAFDIIAAPETTLADTSKASLVLALARAAGLGGMAGGQALDLAAEKQAPDEAGIIRLQAMKTGALIRFACEAGAVISGSLAEDRRRLRAFGEKIGLAFQLADDILDLTSDAATMGKATGKDAARGKGTLVALRGMEWAETQLREHVRDAEALLAPYGARASILIAAAHFIADRKS

SEQ ID NO: 6259 - DNA, 897 bp, Solibacter usitatus Ellin6076
  CDS (1)..(897): transl_table=11
atggatctgcaccgtatggacctgcgcgattacctcgcccagcagcagcgactggtggattcggaactcgaccgtctcgtccccccggaaagcgccgccccggaaaccatccatcgcgccatgcgctacagcctcttcgccggcggcaagcgcatccgccctatcctctgtatagaggccgcccgcaccgtctccgacgattgcgctggcgtcgccgccgccgcctgctcactcgagctcatccatacctactccctcatccacgacgatctccccgcgctcgataacgacgattaccgccgcggcaagctcaccaaccacaaagtcttcggcgacgccatggccattctcgccggcgattcgctcctcaccctcgccttccaggtcctcgcccagcttgacgcgccggacgctcgcaagacgcgcctcatcgccgagctcgccactgccagcggcaccgtgggcggaatgatcggcggccaggtcgccgatctcgaaggcgaaggcaaaccgcccgacgcacagctgctcgaaaccatccatcgcgccaagaccggagccctcctccgcgcctccctgcgtctcggcgccatcttcgccggcgcagccgagccgcagtacgaagccctctcctgctacggccagcacgtcggcctcgcctttcaaatcgtggacgatatcctcgatgttgaagagtcctccgaagccctcggcaagaccgccggcaaggacgccgcccagcacaagatcacctttcccgccgtctacggccttgaaccttcgcgcgaaatggccgcccgcgagtgcgaacgtgcccacgccgtcctcgctcccttcggcgagcgcgccctgcgcctccacgaactggccgatctgatcgtccgccgcaaatcatga

SEQ ID NO: 6260 - protein, 298 aa, Solibacter usitatus Ellin6076
MDLHRMDLRDYLAQQQRLVDSELDRLVPPESAAPETIHRAMRYSLFAGGKRIRPILCIEAARTVSDDCAGVAAAACSLELIHTYSLIHDDLPALDNDDYRRGKLTNHKVFGDAMAILAGDSLLTLAFQVLAQLDAPDARKTRLIAELATASGTVGGMIGGQVADLEGEGKPPDAQLLETIHRAKTGALLRASLRLGAIFAGAAEPQYEALSCYGQHVGLAFQIVDDILDVEESSEALGKTAGKDAAQHKITFPAVYGLEPSREMAARECERAHAVLAPFGERALRLHELADLIVRRKS

SEQ ID NO: 6261 - DNA, 885 bp, Magnetococcus sp. MC-1
  CDS (1)..(885): transl_table=11
atggagttaaaaccctaccttgcggatcgtaaatacttggtcgagagcgcccttgaccggctactacccgccgccgaccgagagcccagagccttgaccggggctatgcgctatagcctgctcatcggcggtaagcggctgcgacccatcctaaccctagcctgctgcgaagccgttgggggagccctagagcgcgcaatgaactttgcctgcgccatggagtgtgtgcatacctactcccttattcatgatgacctaccggccatggataatgacgatctacgccgaggtcaccccacctgtcaccggcaatatggtgaagccaccgccattttggctggcgatgccctgcttacccatgcctttgagctggccgccaagccggtcacaggggtattgcccgaggcacgcctagagctgattggcgaactggcgatggcagcgggaacctatggtatggtgggggggcaaatgctggacatccagggggagaaacgccccttggaactggtgcagttgcaaaacatccatatccataaaactggcgccctcatccgggttgcctgtctggccggtgcccgcttgggtgggggaacccccgatcaagttaaacaccttaaacgctatggcgaggcgttggggctggcgtttcaaatcaccgatgatattctcgatgaggttggagacaccaaaaccctgggtaaagccaccggcgtggatcgcgctttggataaagccacctaccccaaactcatggggctggcccaggcccgcgaggcggctgaaaatcttatgcaagaggcgacccgctgcctaaccgagttcggcccgcaagccgatcctctgcgcgcactggcgcagtatgtcatcgcccgcacccattaa

SEQ ID NO: 6262 - protein, 294 aa, Magnetococcus sp. MC-1
MELKPYLADRKYLVESALDRLLPAADREPRALTGAMRYSLLIGGKRLRPILTLACCEAVGGALERAMNFACAMECVHTYSLIHDDLPAMDNDDLRRGHPTCHRQYGEATAILAGDALLTHAFELAAKPVTGVLPEARLELIGELAMAAGTYGMVGGQMLDIQGEKRPLELVQLQNIHIHKTGALIRVACLAGARLGGGTPDQVKHLKRYGEALGLAFQITDDILDEVGDTKTLGKATGVDRALDKATYPKLMGLAQAREAAENLMQEATRCLTEFGPQADPLRALAQYVIARTH

SEQ ID NO: 6263 - DNA, 903 bp, Azoarcus sp. BH72
  CDS (1)..(903): transl_table=11
atgaccgccctttccccgcaggacttcgccgcctggatgggcgccatccagcaacgcaccgaagccgcgctggcgggcgtgctgcccgaacccacgatagccccggaacgcctgcacgaagccatgcgctatgcggtgctcggtggcggcaagcgggtgcggccgctgctggtgcacgccgccggcgcaattggcggcgcccagcccgaacggctggaccgcatcgcctgcgcggtcgaactgatccacgcctattcgctggttcacgacgacatgccctgcatggacgacgacgtcctgcgccgcggcaagcccaccgtgcacgtcgaatacgatgacgccaccgcgctgctggtgggcgacgcgctgcagaccctcgccttccaggtgctcgcctccgcgccggtcaccgacatgcccacccgccagctcggcatgatcggcctgctggcgatggcatccggttcgcgcggcatggccggcggccaggcgatcgacctcgccgcggtcgggcgccagctcgacctgcgcgaactcgaattcatgcacatccacaagaccggcgcactgatccgctgctcggtgctgctgggcgcgcaggccggcacggtggatggcgaaacgctggagcggctggaccgctacgccaaactcaccggcctgctgttccaggtggtggacgacatcctcgacgccgaggccgacactgccacgctcggcaagactgcaggcaaggatgcggaccacgacaaacccacctatgtcagcctgctcggcgtcgccgacgcccggcgacttgcccaagacatgctggccgaagcgctcgcggcgctcgaaccgctcggcgcgcgcgccggccatctcgccgccctcgccaattacatcgtgcatcggcccttctga

SEQ ID NO: 6264 - protein, 300 aa, Azoarcus sp. BH72
MTALSPQDFAAWMGAIQQRTEAALAGVLPEPTIAPERLHEAMRYAVLGGGKRVRPLLVHAAGAIGGAQPERLDRIACAVELIHAYSLVHDDMPCMDDDVLRRGKPTVHVEYDDATALLVGDALQTLAFQVLASAPVTDMPTRQLGMIGLLAMASGSRGMAGGQAIDLAAVGRQLDLRELEFMHIHKTGALIRCSVLLGAQAGTVDGETLERLDRYAKLTGLLFQVVDDILDAEADTATLGKTAGKDADHDKPTYVSLLGVADARRLAQDMLAEALAALEPLGARAGHLAALANYIVHRPF

SEQ ID NO: 6265 - DNA, 936 bp, Acidovorax sp. JS42
  CDS (1)..(936): transl_table=11
atgatgtccgcagtgccctctatgcccgccacccttgtgcctgacgccgcccccgggtttgacttcaatgactggatgcgtgcagagctggcgcgtgttgaagaagccttgtcgcgctgggtgtgccacgacgcaccggccggtctgggcgaagccatgcgctatgcggtgctggacggcggcaagcgcctgcgcccgctgctggtgctggcggctagccacgccgtgggtggtcagcccgaggccgcgctgcgtgccgcctgcgcggtggagctgatccacgcttactctctggtgcatgacgacatgccctgcatggacaacgacgtgatgcgccgcggcaagcccacggtgcatgtgcgttttggcgaggcccgcgcgctgctggcgggcgatgcgctgcaggcgctggcgtttgagctgctcacacccgaggacggcgtaccccttgccatgcaggcgcggctgtgccgcgaactggcccaggccgccggcgccgccggcatggcgggcgggcaggccatcgacctggccagcgtggggctgcagctgtctgaagaccagttgcgccacatgcatagcctcaaaaccggtgcgctgctgcaggccagtgtggtgatgggtgcagtctgcggacagccgacaggcgcggcgctgcaggcgctgaccgactacggcgcggccatgggcctggcttttcaggtggtggatgatgtgctggatgtcacccaggactcggccacgctgggcaagacggccggcaaggatgctgccagcgacaagcccacctatgtctcgctgatggggctgcagtccgcccgggcctatgccgatgtgctgcatgcccaggcgctggcggcactggtggccagcggcctgacggacacgcgggccctggcggcgttggccgacatggtggtgcgccgctcgcattga

SEQ ID NO: 6266 - protein, 311 aa, Acidovorax sp. JS42
MMSAVPSMPATLVPDAAPGFDFNDWMRAELARVEEALSRWVCHDAPAGLGEAMRYAVLDGGKRLRPLLVLAASHAVGGQPEAALRAACAVELIHAYSLVHDDMPCMDNDVMRRGKPTVHVRFGEARALLAGDALQALAFELLTPEDGVPLAMQARLCRELAQAAGAAGMAGGQAIDLASVGLQLSEDQLRHMHSLKTGALLQASVVMGAVCGQPTGAALQALTDYGAAMGLAFQVVDDVLDVTQDSATLGKTAGKDAASDKPTYVSLMGLQSARAYADVLHAQALAALVASGLTDTRALAALADMVVRRSH

SEQ ID NO: 6267 - DNA, 933 bp, Nostoc punctiforme PCC 73102
  CDS (1)..(933): transl_table=11
atggtagcaactgataacgttcaaaagacaccaccagaggaagccacatttaacttagtagcctatctcaaagagcgacaaaagctttgtgataatgctttggatcgggctatccccatcatttatccagaaaagatttatgaggcgatgcgctactcgttattagctggcggcaagcgtgtacgtcccattctttgccttgctacctgtgaaatgatgggtggcactatcgaaatggctatgccaacggcttgtgctgtggagatgatccacacaatgtctttgattcatgacgacctcccagcgatggataatgacgattaccgtcggggaaagctgacaaatcataaagtctatggcgaagatgtagcgattttggctggggacggcttgttagcacttgcttttgagttagttgcccttaaaacccccgcaaacgttaacagagagctaaccttgcaggtcattgttcgtcttggtcgggcgctgggggcagctggtttggtcggtggtcaagttgtcgatttagagtgtgaagggaaatcagatatttctctagaaacgctaaatttcattcatagacacaaaacttccgcccttttggaagcttgcgtagtttctggcggaattatcgctggggcatcaactgaagatgtacagcgactaacccgttatgctgaaaatattgggctagcattccaaatcatagatgatattctggatatcacttctacaaaagagcaattaggtaaaacagctggtaaagaccaaaaagcgaagaaagttacctatcctagcctttggggacttgaagaatcgcgcttaaaagcccaagagctagttaaagtagcttgtgcagaattagaaccatttggagacagagccaagccactccaagcgatcgctcattttattaccagccgcaataactag

SEQ ID NO: 6268 - protein, 310 aa, Nostoc punctiforme PCC 73102
MVATDNVQKTPPEEATFNLVAYLKERQKLCDNALDRAIPIIYPEKIYEAMRYSLLAGGKRVRPILCLATCEMMGGTIEMAMPTACAVEMIHTMSLIHDDLPAMDNDDYRRGKLTNHKVYGEDVAILAGDGLLALAFELVALKTPANVNRELTLQVIVRLGRALGAAGLVGGQVVDLECEGKSDISLETLNFIHRHKTSALLEACVVSGGIIAGASTEDVQRLTRYAENIGLAFQIIDDILDITSTKEQLGKTAGKDQKAKKVTYPSLWGLEESRLKAQELVKVACAELEPFGDRAKPLQAIAHFITSRNN

SEQ ID NO: 6269 - DNA, 891 bp, Haemophilus somnus 2336
  CDS (1)..(891): transl_table=11
atgtatcaatttgctcaagatctccaagaatccaaacaacgaattaatttttttttagaaaaacaattcgagtgcattgatagttctccatctcctttagctgaggcgatgaaatatggattattgttaggtggaaaacgtattcgcccctttttagtttatgcaacaggaaaaatgctcggagcgaatttaattcaattagattatgcagcagcggctattgaagctattcatgcttactcactcattcatgatgatcttccggctatggataatgattcactccgtcgtggacacccaacttgccatattgcctttgatcatgctaccgctattcttgccggcgatgctttacaaccttttgcttttgagctgttaactcaaacacccgatttgtctgccgaacaaaaattagctttagttcaaactttagccaatgcttctggtgttaaaggtatgtgtttagggcaaagtttagatttaatctcagagaatcaacaaattaatttatccgcacttgaaaagatacatcgcaataaaacaggtgccttgttgtcagctgcagtgaagatggggtttatttgttctccgcactttgcaaatataaaattagaagaacaattaatgcactactcctctgctgtgggtttagcttttcaagtacaagatgatattttagatattgaaggtgaaagtattgtgattggaaaaactgccggatctgatctccttgccgataaaagtacttatccaaaacttataggtttagatggtgcaaaacagaaggcacaagaactttatcatcaagcactacaagaattggatgctttgccctttgacacttcagcattgcatgcactcgctgagtttgtcgtaaatcggcaaagctaa

SEQ ID NO: 6270 - protein, 296 aa, Haemophilus somnus 2336
MYQFAQDLQESKQRINFFLEKQFECIDSSPSPLAEAMKYGLLLGGKRIRPFLVYATGKMLGANLIQLDYAAAAIEAIHAYSLIHDDLPAMDNDSLRRGHPTCHIAFDHATAILAGDALQPFAFELLTQTPDLSAEQKLALVQTLANASGVKGMCLGQSLDLISENQQINLSALEKIHRNKTGALLSAAVKMGFICSPHFANIKLEEQLMHYSSAVGLAFQVQDDILDIEGESIVIGKTAGSDLLADKSTYPKLIGLDGAKQKAQELYHQALQELDALPFDTSALHALAEFVVNRQS

SEQ ID NO: 6271 - DNA, 882 bp, Listeria monocytogenes str. 1/2a F6854
  CDS (1)..(882): transl_table=11
ttgcaagatttaaccctttttttagaacaatataaaaaagtgattgatgagtcgctttttaaagaaataaacgagcgaaatatcgaacctagactaaaagagtccatgttatattctattcaagcaggcgggaaacggattcgtccaatgctagttttcgctacgcttcaagctttaaaagtaaatccgcttttaggtgtaaaaaccgcaacagcgttagaaatgattcacacatacagccttattcatgatgatttaccagcaatggataacgatgattatcgtcgaggcaagtggactaatcataaagtttttggcgatgcaactgcgattttggcaggagatgctttactaacgctcgctttttctattttagctgaagacgataatttatcttttgagacacgcattgctttgattaaccaaattagttttagtagcggtgcagaaggaatggttggtggtcaacttgcagacatggaagcggaaaacaaacacgtgacgctagaagagttatcatccattcatgcacgaaaaacgggtgaattattaatttatgctgtaacctctgcagcaaaaattgcggaagctgatctagaacaaacgaaacgcttacgaatttttgcagagaatattgggattggatttcaaattagcgacgatattttagatgtaattggtgatgaaacgaaaatgggtaaaaagacaggggccgacgcttttctgaataaaagtacctatcccggattactcacgcttgatggggcaaaaagggcattaaatgagcatgttacgattgcaaagtcagcgctttcagggcatgatttcgatgatgaaattctcttgaaaattgctgatttaatcgcacttagagaaaattaa

SEQ ID NO: 6272 - protein, 293 aa, Listeria monocytogenes str. 1/2a F6854
MQDLTLFLEQYKKVIDESLFKEINERNIEPRLKESMLYSIQAGGKRIRPMLVFATLQALKVNPLLGVKTATALEMIHTYSLIHDDLPAMDNDDYRRGKWTNHKVFGDATAILAGDALLTLAFSILAEDDNLSFETRIALINQISFSSGAEGMVGGQLADMEAENKHVTLEELSSIHARKTGELLIYAVTSAAKIAEADLEQTKRLRIFAENIGIGFQISDDILDVIGDETKMGKKTGADAFLNKSTYPGLLTLDGAKRALNEHVTIAKSALSGHDFDDEILLKIADLIALREN

SEQ ID NO: 6273 - DNA, 891 bp, Bacillus cereus G9241
  CDS (1)..(891): transl_table=11
gtgacaattgcttttgatacttttttgaaagaaagtaaaactttcgtagaagagaagcttgtaagctatgcaaatgaattacaatgtccaaatgtacttcgtgaagcgatggcatattctttggaagcgggtggaaagcgtctccgcccgttacttttatttgcaacattacaagcgtttggtaaagaaaaaaatcttggtgtaggtgcagcttgtgctcttgaaatgatacatacatactcgttagttcatgatgatttaccttgtatggatgatgatgatttaagaagagggaagcccacaaatcataaagtatttggtgaagcgatggcagttttagcaggagatggtttgttgacatatgcttttcaagttattatggcatatgaacaaaaggaaatctctgctgagaaaaaagtaagacttgtacttgagcttgcaaaagcggcagggccagaaggaatggttggcggacaagtggcagatatggaagcggaagggaaacagcttacaatcgatgagttggagtatattcataagcataagactggaaagctacttgaattcgctgtacttgcagggtcgatactgtctgatgcgacagaagaacaggaagaaaaattacttgagtttgcaaaatatatcggcctagctttccaaatccgagatgatattttagatgtggaaggaaccgaagaagagattggaaaaccgattggtagtgatgtttctaacgaaaagagcacatatacgacgttatttactgtagatagagcaaaggatattttagaagaaactattgcaaaagcaaaagatgctattggttccttgcaattacaagatgaatatttactatctatttgtgatttgattgcaaaacgtaataactaa

SEQ ID NO: 6274 - protein, 296 aa, Bacillus cereus G9241
MTIAFDTFLKESKTFVEEKLVSYANELQCPNVLREAMAYSLEAGGKRLRPLLLFATLQAFGKEKNLGVGAACALEMIHTYSLVHDDLPCMDDDDLRRGKPTNHKVFGEAMAVLAGDGLLTYAFQVIMAYEQKEISAEKKVRLVLELAKAAGPEGMVGGQVADMEAEGKQLTIDELEYIHKHKTGKLLEFAVLAGSILSDATEEQEEKLLEFAKYIGLAFQIRDDILDVEGTEEEIGKPIGSDVSNEKSTYTTLFTVDRAKDILEETIAKAKDAIGSLQLQDEYLLSICDLIAKRNN

SEQ ID NO: 6275 - DNA, 930 bp, Crocosphaera watsonii WH 8501
  CDS (1)..(930): transl_table=11
atggttatgacaggtgaagaccgtgtgacgcatacagaagcatcgaattttgagcttgcgtcctatcttaaagagaaaaaacagttagttgaagcggccttggatcaatcccttcacattacccgtcccgaaaaaatctacgaagctatgcgttattccctcttggcagggggaaaacgattacgccccattctctgcctaaccacctgtgaactgatgggtgggaccgtagaaatgtcactccctacagcttgcgccctagaaatgatccataccatgtctttgattcatgacgatctccctgctatggataacgatgattatagacggggaaaattgaccaatcataaggtttatggagaagacatcgctattttagcaggagacgctttattgtcctacgcctttgaatatgttgccacccaaacctgtaatgtagatttccctaacctcatcgatgtcattgcccgtttaggacgtaccgttggggcagcgggattagtcgggggtcaagtgttagacttagaatcggaaggtagaaccgatgtcaccgtagataccttaaaattcatccatatccacaaaacaggggcattattggagacatctgtggtgtctggagccattttagccggagctaagccagaggatatagaaaggctttctcgttacgctcagaacattggtttagcctttcaaatcatcgatgatgttttagacgtaactgccagcagtgaagaattaggcaaaaccgccggaaaagatgaacgggcgcaaaaagctacttatcccagtttatggggcttagaagaatcacaaaaacaagctcaagccctgattgacgatgcgatcgcccaactgagtccctacggccaagcagcccaacccttagaagcgatcgcccaatttattgttgctcgcaaaaactaa

SEQ ID NO: 6276 - protein, 309 aa, Crocosphaera watsonii WH 8501
MVMTGEDRVTHTEASNFELASYLKEKKQLVEAALDQSLHITRPEKIYEAMRYSLLAGGKRLRPILCLTTCELMGGTVEMSLPTACALEMIHTMSLIHDDLPAMDNDDYRRGKLTNHKVYGEDIAILAGDALLSYAFEYVATQTCNVDFPNLIDVIARLGRTVGAAGLVGGQVLDLESEGRTDVTVDTLKFIHIHKTGALLETSVVSGAILAGAKPEDIERLSRYAQNIGLAFQIIDDVLDVTASSEELGKTAGKDERAQKATYPSLWGLEESQKQAQALIDDAIAQLSPYGQAAQPLEAIAQFIVARKN

SEQ ID NO: 6277 - DNA, 870 bp, Exiguobacterium sibiricum 255-15
  CDS (1)..(870): transl_table=11
atgattgtcttaacagagtggaaaacgcaggtggagcaagcactggaaactttcatgaaccgtctcgaagcaccggatcgtctgcgggaagcgatgctgtattcccttgatgcaggggggaaacgtgtccggccggcattgatttatgctgtcctcgatgcttacggcgtcgatcgtaagacgggtgacgcaacagcggcggcgcttgagatgattcatacatattccttgattcatgatgatctaccggcgatggacgatgatgatatgcgacgcggacgtccgaccaatcatattgaattcgatgaggcgaccgccattctcgcaggggatgcgttactgacgaatgcctttacgtgtctactcgaaacgatggccgcagcggaagttaaagtgaaattactcgagcgactcgcagcagcagcgggtgcagccgggatggtcggcggtcaactggatgacatgcttggagagcgcggaggaatcagtgatgcggaagaactggaatcgattcaccgccggaaaacaggagccttgttgatttttgcagtcgaagcaggcggcattttagccggagtcgcagatgaggatctcgaacagttgaaacggtacggccgtcatctcggaattgctttccaaattcaagacgacatcctggatgtgaccggagatgctgacaaaatcgggaaaccggttggcagtgatgaaggaaatgacaaagcaacttatccgaaactgttgggtcttgacggggcgaaaagggcacttgcagcccaagtgacggcagcgaatgaagcaatcgaggctctttccgtcgaagcgacaccgcttaaggatttgctcgacttcgtcgtcaagcgtgaccattaa

SEQ ID NO: 6278 - protein, 289 aa, Exiguobacterium sibiricum 255-15
MIVLTEWKTQVEQALETFMNRLEAPDRLREAMLYSLDAGGKRVRPALIYAVLDAYGVDRKTGDATAAALEMIHTYSLIHDDLPAMDDDDMRRGRPTNHIEFDEATAILAGDALLTNAFTCLLETMAAAEVKVKLLERLAAAAGAAGMVGGQLDDMLGERGGISDAEELESIHRRKTGALLIFAVEAGGILAGVADEDLEQLKRYGRHLGIAFQIQDDILDVTGDADKIGKPVGSDEGNDKATYPKLLGLDGAKRALAAQVTAANEAIEALSVEATPLKDLLDFVVKRDH

SEQ ID NO: 6279 - DNA, 876 bp, Xylella fastidiosa Dixon
  CDS (1)..(876): transl_table=11
gtgagcaaagcgctgttcacgcgctggtgccaacgcaccgacagctacttagaacgaacgttatccatcctcacccaagcgccacagcggctccacgccgcgatgcgatacaccgtactgagtggcggcaaacgcatccgtcccttactggtttacgctgccggccacctgtttcatgtcgatgaacccctactcgacgtaccggctgcggccgtggaactgatccatgcctattccctggtgcatgatgaccttcccgccatggatgacgacctcttacgccgagggcgtcccaccgtccatatcgccttcgacgaagccactgcaatcctcactggcgacgccttgcagaccctggcgtttgaatgcttagccgatgccccagccgacgcctccctgcgtatcgcctggttacagacattgacacacgccgcaggagttgccggcatgtgtggcggccaggcactagatattgacgccactggccaatcccagacactcaaagcactggaagccatgcatgcgttgaagagcggcacattgatgcgagccgccgtgagaatgggtgccctggctggcgacccttccccggaggatctgcactccctggacacctttgcggccacccttggattagcattccaagtgcgtgacgacatcctggatatcgagtctagttccgaacaacttggtaaaacgactggcaaagatgccatacagcagaaatccaccttccccgccctcctgagcgtagaaggtgccaaatgctatttacaagaattggcagaacgcctgtacacccaattgcatccttacggcgaacgtgctgcccccctgaccgcactggcacgcttggctgtagaacgtgctcactga

SEQ ID NO: 6280 - protein, 291 aa, Xylella fastidiosa Dixon
MSKALFTRWCQRTDSYLERTLSILTQAPQRLHAAMRYTVLSGGKRIRPLLVYAAGHLFHVDEPLLDVPAAAVELIHAYSLVHDDLPAMDDDLLRRGRPTVHIAFDEATAILTGDALQTLAFECLADAPADASLRIAWLQTLTHAAGVAGMCGGQALDIDATGQSQTLKALEAMHALKSGTLMRAAVRMGALAGDPSPEDLHSLDTFAATLGLAFQVRDDILDIESSSEQLGKTTGKDAIQQKSTFPALLSVEGAKCYLQELAERLYTQLHPYGERAAPLTALARLAVERAH

SEQ ID NO: 6281 - DNA, 915 bp, Erythrobacter sp. NAP1
  CDS (1)..(915): transl_table=11
atggctctcgcaagtgtcgagaatgacgtgctgggtgatgcgctcaaaagggtgcagggcgagatcgattccgttttcgacgcctttctgccggtcccacatgacacaagcgcgaggctggtcgaggcgatgcgctacgccgcgatgggcggcggcaaacgggtccgcccgctgttgctcgtcagcaccgcggaattgtacggcgttgaccgcaccgctgcgctttgtgccgctgcggcggtcgaggcgatccacgtttactcgctgatccacgacgacttgccatgcatggatgatgacgaccttcgtcatggcaaacccacggttcacaaggtttatgacgacgcgacagcggttctcgctggcgacgcgctccatgcgcttgccttcgaaatcctcgctgacagccagaccagcgccgatcccttcgttcgcagcgagctgatcgcaactctcggtaaggcgagcggcatgggcggtatggcgggcggccagatgatggacatggtcgctgatgaggagggcgtagaatacgaccttcggaccatcacccgtctgcaacagctaaagaccggcgccttgctggcagcaagcgtcgagatgggcgccatccttggcaaggttgccccggaaggccgcgcccacctcagggcctattcacgcgacatcgggctcgcgttccagatcgcggacgatctgctcgatgtcgaaggcgacgccgacaaggcaggcaaggcgctgcgcaaggacgacgagcagggcaagcaaaccttcgtcacactgatgggcgtcgacaaggctcgcgaacaggcccgcgctctggtcgatcaggcggtcgcgcatctttccagccacggtagcgaggcggacacgttgcgcgcgctggctcggttcattgtcgagcgggaccgatag

SEQ ID NO: 6282 - protein, 304 aa, Erythrobacter sp. NAP1
MALASVENDVLGDALKRVQGEIDSVFDAFLPVPHDTSARLVEAMRYAAMGGGKRVRPLLLVSTAELYGVDRTAALCAAAAVEAIHVYSLIHDDLPCMDDDDLRHGKPTVHKVYDDATAVLAGDALHALAFEILADSQTSADPFVRSELIATLGKASGMGGMAGGQMMDMVADEEGVEYDLRTITRLQQLKTGALLAASVEMGAILGKVAPEGRAHLRAYSRDIGLAFQIADDLLDVEGDADKAGKALRKDDEQGKQTFVTLMGVDKAREQARALVDQAVAHLSSHGSEADTLRALARFIVERDR

SEQ ID NO: 6283 - DNA, 948 bp, Synechococcus sp. RS9917
  CDS (1)..(948): transl_table=11
atgaccgccgcggcgaccagtcccgacagtgctccgccggcgggagcggctcagggcttcgacttcaacgcctacctggcggctcgaaaagctgaagtggagtcggctctggatgcctccctgccgccggaacggccggaatcgctgcgtgaagcgatgcgctattccctgttggcgggtggcaagcgtctgcgcccgattctttgcctggcggcctgcgagctggccggtggcgatccggctctggcgatgccgacggcggtggcgctggagatgatccacaccatgtcgctgatccatgacgatctgcccgccatggacgatgacgacctgcgccgtggtcgccccaccaaccacaaggtgtatggcgaggcggtggcgattctcgccggtgatgccctgctcacccgggcctttgaaatggtggcgctgcgcagccccggggtgccagccgagcggctgttgcaggtggtggccgagctctccctggtggccggtgcgcctggcctggtcgggggccaggtggtggatctggagagtgagggcaagcaggtcgacctcgagaccctggagtacatccatctccataagaccggggcactgctgcgcgcctgtgtgatcaccggcgccttgattgccggagctgatgcctcccggatcgactccctgcgcacctatgcccgcggcatcggcctggccttccagatcgtcgacgacatcctcgatgtcaccgccagcagcgatgtgctcggcaaaacggccggcaaggatctgatcgccgacaaaaccacctacccgaagctgctcggcctggaggaatccaggcaacgggccaaggcgctggtggaggaggcgaaggcgtcgctcgcggcgttcaagccgacagagcccgccaaggcctcgcctctgctcgctctggccgattacgtgatcggtcgcgatcgatga

SEQ ID NO: 6284 - protein, 315 aa, Synechococcus sp. RS9917
MTAAATSPDSAPPAGAAQGFDFNAYLAARKAEVESALDASLPPERPESLREAMRYSLLAGGKRLRPILCLAACELAGGDPALAMPTAVALEMIHTMSLIHDDLPAMDDDDLRRGRPTNHKVYGEAVAILAGDALLTRAFEMVALRSPGVPAERLLQVVAELSLVAGAPGLVGGQVVDLESEGKQVDLETLEYIHLHKTGALLRACVITGALIAGADASRIDSLRTYARGIGLAFQIVDDILDVTASSDVLGKTAGKDLIADKTTYPKLLGLEESRQRAKALVEEAKASLAAFKPTEPAKASPLLALADYVIGRDR

SEQ ID NO: 6285 - DNA, 903 bp, Synechococcus sp. WH 5701
  CDS (1)..(903): transl_table=11
atggccgtggcggtgagcacggagtttgatttcgccgcctacctggagtcggctcgggggcaggttgagctggcgctcgaggcggccctcggacctgagcgacccgagtcgctgcgggaggccatgcgctactcgctgctggccggtggcaagcgcctgcgcccgatcctctgcctggcggcctgtgaactggccggcggagaggtggctctggccctgcccacggccgtcgcgctggagatgatccacacgatgtcgttgatccacgacgatctccccgccatggacaacgacgacctgcgccgggggcgtcccaccaaccacaaggtctacggcgatgcccaggcgatccttgccggcgacgccctgctgacccgggccttcgagatggtggccctgcgcagtccaggcgtgccggccgagcgcctgctgcaggtggtgggtgagctgtccctcgccgccggagcccctgggctcgtgggaggacaggtggtcgacctcgagtcagaaggtaaggatgtggacctcgccaccctggagtacatccatctgcacaagaccggtgccctgctgcaggcctgcgtcctcaccggggccatgatcgccggagccccggagcccctgctgcagggcctgcgcacctattcccggggcatcggcctggcctttcagatcattgacgacattctggatgtgaccgccagcagcgaggtgctgggcaagaccgcaggcaaggacctcaccgctgacaaaaccacctacccgaagctgctgggcctggaggaatcaaggcaacgggccgacgctctggtggcggaggccaaggccgccctccagccctggcaggccagtgcccagcctctgctggccctggccgactacatcaccagccgcgaccgatga

SEQ ID NO: 6286 - protein, 300 aa, Synechococcus sp. WH 5701
MAVAVSTEFDFAAYLESARGQVELALEAALGPERPESLREAMRYSLLAGGKRLRPILCLAACELAGGEVALALPTAVALEMIHTMSLIHDDLPAMDNDDLRRGRPTNHKVYGDAQAILAGDALLTRAFEMVALRSPGVPAERLLQVVGELSLAAGAPGLVGGQVVDLESEGKDVDLATLEYIHLHKTGALLQACVLTGAMIAGAPEPLLQGLRTYSRGIGLAFQIIDDILDVTASSEVLGKTAGKDLTADKTTYPKLLGLEESRQRADALVAEAKAALQPWQASAQPLLALADYITSRDR

SEQ ID NO: 6287 - DNA, 891 bp, Pseudoalteromonas tunicata D2
  CDS (1)..(891): transl_table=11
gtgaccataaagaaactcattgtagaaaatcagttacgagtagagggcgtgcttgatactttattaacgcagccgatgattactgaccaaactttattagcagcatcgcgttacagtctattaaatggtggtaagcgcatgcgcccttgcatggtctatgtaacaggggaaatattcggtgccaatcccgatgatttagatttagtcgcagcagcaattgagtgtattcatagctattcattagtacatgatgacttacctgctatggatgatgatgacttacgcagaggtatgccaacatgccatattgcatatgatgaagctacggcgatattagctggcgacgcactgcaaacctttgcttttgagatattatcttcgagcaaatttaaaacaatcaacgcccagcaacaagttgcattaatcgcaaatttagcaagtgcatcagggcttcgaggtatgtgcggcggtcaagctttagatattgcagcaactaattgtgctataaacttaactcaattagagcaaattcatcagttaaaaacgggagcattattaacaagtgctattttaatgggcgctatttgcgcgcctaaaacgacacctgaaatattgcaaaaccttaaaatatttggcgaaaatattggcttagcttttcaagtgcaagatgacattcttgatattgaaggcgacaccgctgttttaggcaaaccacagggatcagatttacaagccaataaatcaacttatccatccctattaggacttgagcaagctaaattaaaatctcagcaattgtacgaaaatgcacttaacgcattagcacaaatacctgcagataccacacagctagcacaattggctgcgtatatcgtttctagagatcactaa

SEQ ID NO: 6288 - protein, 296 aa, Pseudoalteromonas tunicata D2
MTIKKLIVENQLRVEGVLDTLLTQPMITDQTLLAASRYSLLNGGKRMRPCMVYVTGEIFGANPDDLDLVAAAIECIHSYSLVHDDLPAMDDDDLRRGMPTCHIAYDEATAILAGDALQTFAFEILSSSKFKTINAQQQVALIANLASASGLRGMCGGQALDIAATNCAINLTQLEQIHQLKTGALLTSAILMGAICAPKTTPEILQNLKIFGENIGLAFQVQDDILDIEGDTAVLGKPQGSDLQANKSTYPSLLGLEQAKLKSQQLYENALNALAQIPADTTQLAQLAAYIVSRDH

SEQ ID NO: 6289 - DNA, 882 bp, Oceanospirillum sp. MED92
  CDS (1)..(882): transl_table=11
ttggagatccgccagcagctaaagcattaccagtcacgtgtagataaccatctggaaaactgcttaccctctgagagtatcgacccacttcttcaggaatcgatgcgctactcattattcaatggcggcaagcgggtccgtcctgcgctggtttatctggttaatcagatacttggcggcaccgacgaagcagctgataatgccgccgctgcaatcgagtgtatccacagctattcgctggttcatgatgatctacccgccatggatgatgatgacctgcgccgcggcaaacctacctgtcatatcgcctacgacgaagcaacggcaatcctggccggagacgccctgcaatgcctcgcttttgaactgcttgccaatgatcagcaacaaagcgctgacagcaaaattaagttgattcagttactgagccaggcttcgggccacggggggatggttgtcggccaatcctttgatcttcgccatgtgggcaaaccacttacgctggagcagttagaagccatgcatcagcataaaaccggggcccttctactctgtgcggtacatatgggagcagcctgcggccccagagtttctaaagaacaattagatgcccttacccgatacgcgctcgcaattggcctcgccttccaggttcaggatgacattctggatattgaaggtgactctgagacgattggaaaaccccagggttctgatctggaactgaataaacctacgtatcctgctttactgggccttgaaggtgctaagctgaagctaactaagctccatcatgaagcgattgaagccctgactatttttaacgaaaacgcagagccacttcgcgctttggctgattttattgttcgcagagatcactaa

SEQ ID NO: 6290 - protein, 293 aa, Oceanospirillum sp. MED92
MEIRQQLKHYQSRVDNHLENCLPSESIDPLLQESMRYSLFNGGKRVRPALVYLVNQILGGTDEAADNAAAAIECIHSYSLVHDDLPAMDDDDLRRGKPTCHIAYDEATAILAGDALQCLAFELLANDQQQSADSKIKLIQLLSQASGHGGMVVGQSFDLRHVGKPLTLEQLEAMHQHKTGALLLCAVHMGAACGPRVSKEQLDALTRYALAIGLAFQVQDDILDIEGDSETIGKPQGSDLELNKPTYPALLGLEGAKLKLTKLHHEAIEALTIFNENAEPLRALADFIVRRDH

SEQ ID NO: 6291 - DNA, 927 bp, Xanthobacter autotrophicus Py2
  CDS (1)..(927): transl_table=11
gtgaccttttccctcaaggaccggctcgacgcctccgccgcggccaccgaggcccgcctcgccctcgccctcgccgacgccgcgctccccggcgagcggctacggcccgagcggctgatggccgccatgcgccacggcgcgctcggcggcggcaaacggctgcggccgttcctggtgatcgaaagcgctgccctgttcggcatcccggccgatcaggcggtgacggccgccaccgccatcgagtgcatccattgctattccctggtccatgacgatctgccagccatggacgacgacgatctgcgccggggccggcccaccgtgcaccgggcctttgacgaggccaccgccatcctcgccggcgacggcctgctcaccctcgccttcgaccttctggcgggggaggatgcccatcccgatccggccgtgcgcatcgcactggtgcgggcgctggcccgcgcttcgggcatcggcggcatggtgggcgggcagatgctggacctcgccgccgagggccgcttctccggcggcacccccctcgccctggcggaagacgccatccgcgacctccaggccatgaagaccggcgcgcttttggcggtctccgtggaggccggcgcgcttttgggtggcgccacggcggacgagcgcgcggcgctcctggcctatggccgggcgctgggcgccgccttccagatcgccgacgacatcctcgacgtggaaggcaccgccgaggaggtgggcaagaaggtgggcaaggacgccgccgccggcaaggcgaccctggtctcccgcctcggcctgcccgccgcccgcaccctgctcgaccggctggtggcggatgcgtctgccgccctcgcccccttcggcgcgcgcggcgcggtgctggccgaggccgccctgttcgtggccaaccggcgcaactga

SEQ ID NO: 6292 - protein, 308 aa, Xanthobacter autotrophicus Py2
MTFSLKDRLDASAAATEARLALALADAALPGERLRPERLMAAMRHGALGGGKRLRPFLVIESAALFGIPADQAVTAATAIECIHCYSLVHDDLPAMDDDDLRRGRPTVHRAFDEATAILAGDGLLTLAFDLLAGEDAHPDPAVRIALVRALARASGIGGMVGGQMLDLAAEGRFSGGTPLALAEDAIRDLQAMKTGALLAVSVEAGALLGGATADERAALLAYGRALGAAFQIADDILDVEGTAEEVGKKVGKDAAAGKATLVSRLGLPAARTLLDRLVADASAALAPFGARGAVLAEAALFVANRRN

SEQ ID NO: 6293 - DNA, 948 bp, delta proteobacterium MLMS-1
  CDS (1)..(948): transl_table=11
atggtgagctggtcgccgaaccgtttgcagaacctgacgagggctaaagtgaccacgctggatatcaagcaatacctggccgcccagcgtgagctggtggaagcggccctggaacaattgttgcccgccgaggatgggccgctggcggcgcatatcgaggccatgcgctacagcctgctggccggcggcaagcgggtccggcccattctctgcctggccgccgccgaggcggtggggagtgaccccaagccgctgctgccggtggccggcgccctggagtgtatccacacctattccctgatccacgatgatctgccggccatggacaacgatgacctgcgccggggcatgcccaccagccataaaaaatttggcgaagcggcagccatcctggccggcgacgggctgctcagcttcgcctttgaactgctggcccggccgctgggtgagcacggcccggggccggccgcccagttgcggctgctggccaccgtggcggcggccgttggcccgcgggggatggtgggcggccaggtgctggatatcgaggccgaagggcgcaggcttgaacttgacgaattacagcagatccaccgccataaaaccggggccctgatcaccgccgccgtccaggccggggccatcggcggcggggccagcgagacccaactgcaggccttgacccgttacggccaacagacagggctggccttccaaatcgtcgatgacctgctcaacgtcaccagtgataccgccaccctgggcaaggccgccggcagcgatgccgcccggggcaaggccacctaccccgccctgctgggtctggaagccaccgaagacaaggcccgggaagcggtggcggcggcggtggcggcccttgaaagctttgaccaccgggccgaacccctgcgggaattggctcgttatatccactcccgcaaaaaataa

SEQ ID NO: 6294 - protein, 315 aa, delta proteobacterium MLMS-1
MVSWSPNRLQNLTRAKVTTLDIKQYLAAQRELVEAALEQLLPAEDGPLAAHIEAMRYSLLAGGKRVRPILCLAAAEAVGSDPKPLLPVAGALECIHTYSLIHDDLPAMDNDDLRRGMPTSHKKFGEAAAILAGDGLLSFAFELLARPLGEHGPGPAAQLRLLATVAAAVGPRGMVGGQVLDIEAEGRRLELDELQQIHRHKTGALITAAVQAGAIGGGASETQLQALTRYGQQTGLAFQIVDDLLNVTSDTATLGKAAGSDAARGKATYPALLGLEATEDKAREAVAAAVAALESFDHRAEPLRELARYIHSRKK

SEQ ID NO: 6295 - DNA, 1023 bp, delta proteobacterium MLMS-1
  CDS (1)..(1023): transl_table=11
atgaaagctgagaaactgaaaaaacaactgcaagcggccgccggccagatcgagacggtgatggccgccgacctggaaggggtgaccagtccccggctgcgggaggtgttggagcacgccctttttgccggcggtaaaaggatccgccccctgctgaccctgctggccgcccggttgaccacggccgccaaccacgggggcgtgccgacggagccgccggcggccgaccaggccaccgaccaacagcggctggccatcgcctttgaatatctgcataccgccagcctgctccatgatgatgtcatcgaccatgccgcccagcgccgggggcgggagaccgtcaacagtcgctgggatcagggccacgccatcctggccggggattttttgcacgcccgggccatgtggctggccggcaattatggcggccagccctgcctggagttgatcgccagcgccaccgaagcgatggtggcggcggagtttctgcaggccgaggcggccgccgcgcgggactggcgacgggagacctactttgcggtattggaaggcaaaaccgcggctctgatcgccgccgcctgccagtgcggcgtggtggcaggcggcggtgattaccggcagggccaggctctacgggtctacggggccaacctgggcctggcctttcagatcatcgatgacctgctggattttctgggcgatccccgggccaccggcaaagcggtgggcaacgatctccaggaaggcaagatgaccctgccgctgctgctggcccaccaacgggcaacaccggagcagcggtgctggctggagcaactgctggccgccgaacccgctcggcgccaggcggaactggacacggtgcgccaactgctgacggaaaccgacgcctttgccggctgccggagccaagcccgggagttgatcgccaccggcctggcggggctggaaatctttcccgccggcggcgagcgcgagctgctgcaggggctgggcgaatacgtgctccagcgtgaccactga

SEQ ID NO: 6296 - protein, 340 aa, delta proteobacterium MLMS-1
MKAEKLKKQLQAAAGQIETVMAADLEGVTSPRLREVLEHALFAGGKRIRPLLTLLAARLTTAANHGGVPTEPPAADQATDQQRLAIAFEYLHTASLLHDDVIDHAAQRRGRETVNSRWDQGHAILAGDFLHARAMWLAGNYGGQPCLELIASATEAMVAAEFLQAEAAAARDWRRETYFAVLEGKTAALIAAACQCGVVAGGGDYRQGQALRVYGANLGLAFQIIDDLLDFLGDPRATGKAVGNDLQEGKMTLPLLLAHQRATPEQRCWLEQLLAAEPARRQAELDTVRQLLTETDAFAGCRSQARELIATGLAGLEIFPAGGERELLQGLGEYVLQRDH

SEQ ID NO: 6297 - DNA, 885 bp, Oceanobacter sp. RED65
  CDS (1)..(885): transl_table=11
atgacatttcaagaatttcaaacatggagtcaagatcgcttccaatcgattttgaaggctgattacgtacttcccaacgtcgatgcgcaacgtttaaaagacgccatgacatacagcctgctcaacggtggcaagcgtgttcgtccattaatggtatatgccacgacacgatcactctctggagatctgcaagccgctgatcaatgtgcccttgccgtggaaatgatccatgcctattcccttgtgcatgacgacctacctgccatggatgacgatgaactgcgccgcggccaacccacttgtcatattgcgtttgacgaagccaccgccatattggccggtgacgccctgcaaacacaagctttccaagtattagtacagccaattgatggcatggcaccacagcagcaattacgcatggtacaaaccttggctcacgctagtggtttggcgggtatggccggtggtcaaagtcttgatttagaggccgtcgacaaacaagtagatatcgaatatctgcaaaacatgcacttgcacaaaaccggcgcattaattgaggctagcgtaaaattgggtggcctatgcgccaatgccagcgagcaacaactcagctacttatctgtctacgcccaagcaattggcttagcctttcaggtacaggatgacatcttggatgtgatcagtgatacccgtacactagggaaacctcaagggtctgatgaatcgcgcaataaacccacttatgtttccttattagggttggatggtgctaaacgcaaagcgcaagatctacatcaacaagcgcgggatgccttgaggaaattggatgcggacacaagcccactagaggatatcgctcgctatattattgagcgaacgtattaa

SEQ ID NO: 6298 - protein, 294 aa, Oceanobacter sp. RED65
MTFQEFQTWSQDRFQSILKADYVLPNVDAQRLKDAMTYSLLNGGKRVRPLMVYATTRSLSGDLQAADQCALAVEMIHAYSLVHDDLPAMDDDELRRGQPTCHIAFDEATAILAGDALQTQAFQVLVQPIDGMAPQQQLRMVQTLAHASGLAGMAGGQSLDLEAVDKQVDIEYLQNMHLHKTGALIEASVKLGGLCANASEQQLSYLSVYAQAIGLAFQVQDDILDVISDTRTLGKPQGSDESRNKPTYVSLLGLDGAKRKAQDLHQQARDALRKLDADTSPLEDIARYIIERTY

SEQ ID NO: 6299 - DNA, 888 bp, Alteromonadales bacterium TW-7
  CDS (1)..(888): transl_table=11
gtgagcataaaagactatattgaacgtgctcagatagatgtagctactacactcaatagctactttgaacaaccgctcgatagcgataaaacaataaaagaagccactcattacagcttatttaatggtggaaaaaggctgcgcccttttttggtgtacgctgttggtgaaatgctaggcgctaagaaaagtgacttagacgttttggctgcagccatagaatgcatccatagttattcattagtacatgacgacctaccagctatggatgatgacgatttacgccgcggctaccccacttgccatattgtgtatggcgaagcgcaagccattttagcgggtgatgcattacaaactctcgcctttgaacttatagccacacataactttaattgctcagcgcaatcacaagtaaaaatgattgctgcacttgcacatgcatcaggtattgaagggatggtggcaggacaaggtttagacattgccgcaactgacaaagttgtttctgtacaagagcttgagcgcatccataagttaaaaaccggtgcactaattaactgtgctataacactaggtgcactgtgcagtgaaaaagcagatgaacaaactttagaaaacttgagcgtttttgggtatgctatagggctggcatttcaagtacacgacgatattttagacgtggaaggtgacacctttatactaggtaaaccacaaggctcagatatagaagcgaataaagcgacatacccggcgttattaggtatgctaggcgctaaagaaaaggcgcaaaatttaataacacaagcccacgaagcgttagcacttattgatgcagatactacgcttcttgcgtcgctggcaaattaccttattgaacgtgaccactag

SEQ ID NO: 6300 - protein, 295 aa, Alteromonadales bacterium TW-7
MSIKDYIERAQIDVATTLNSYFEQPLDSDKTIKEATHYSLFNGGKRLRPFLVYAVGEMLGAKKSDLDVLAAAIECIHSYSLVHDDLPAMDDDDLRRGYPTCHIVYGEAQAILAGDALQTLAFELIATHNFNCSAQSQVKMIAALAHASGIEGMVAGQGLDIAATDKVVSVQELERIHKLKTGALINCAITLGALCSEKADEQTLENLSVFGYAIGLAFQVHDDILDVEGDTFILGKPQGSDIEANKATYPALLGMLGAKEKAQNLITQAHEALALIDADTTLLASLANYLIERDH

SEQ ID NO: 6301 - DNA, 930 bp, marine gamma proteobacterium HTCC2143
  CDS (1)..(930): transl_table=11
atgaatcatgacttttctgcttttctaatgcagacgaaaactcgagtcgatcagcttctgggagagcatcttggcagcttcagctccagttatgccgctgttgacagcggtatttatctcactcgactgcaacaggcaatgcactacagcctgatcaatgggggaaagcgaatacggccagtgctggtctacgcaacagccgctgcgataaccaccgatgttagcccagtggttacagccaatcttgacagaattgcctgctccatagagatgattcacgcttattcgttaattcacgatgaccttccggcaatggacgacgacgatttgcgacgcggtcaaccgacctgccacagagcctttgatgaggccaccgcaatcctagcaggagacgctctgcaagccagagcttttgagttactgactgaattgaccgaatgtccgccacacatacatttaaacttgcttagaatactgacccaggcatcggggcaacgaggtatggtcggcggccaattaatcgatctggaatccgtcgacaaacctatcgatgttcagcagctagaaaccattcatcgactaaaaaccggagcactaattagagcatcaattgccatgggggcaacattaactggagctgatcgacagcaactagaacaactcgattgttatggtgatgccattggtttggcatttcaggttcacgacgacatactcgatatcgaggctgatacagcgactctcggcaaaacccagggagccgacattgctctaaacaagccaacctatccgtctctgctcggaatcgacggcgctaaagctaaagcggctcaattacaccagcaatcactgacagcaattgaacactttgacgccaatgcgctgctattgcgcgaattgtccggatatattatttcccgcagccactga

SEQ ID NO: 6302 - protein, 309 aa, marine gamma proteobacterium HTCC2143
MNHDFSAFLMQTKTRVDQLLGEHLGSFSSSYAAVDSGIYLTRLQQAMHYSLINGGKRIRPVLVYATAAAITTDVSPVVTANLDRIACSIEMIHAYSLIHDDLPAMDDDDLRRGQPTCHRAFDEATAILAGDALQARAFELLTELTECPPHIHLNLLRILTQASGQRGMVGGQLIDLESVDKPIDVQQLETIHRLKTGALIRASIAMGATLTGADRQQLEQLDCYGDAIGLAFQVHDDILDIEADTATLGKTQGADIALNKPTYPSLLGIDGAKAKAAQLHQQSLTAIEHFDANALLLRELSGYIISRSH

SEQ ID NO: 6303 - DNA, 888 bp, Candidatus Desulfococcus oleovorans Hxd3
  CDS (1)..(888): transl_table=11
gtgaagaatcttgagacctaccttgcccgtcgtcaaaaggccgtcaacgaggccctggaccggattcttgctgactgcgttcccgggggccggcttttttccgccatgcgccactccctgaaggccggcggcaagcggcttcgtcccatcctctgcatggcggcggcggaagccgtcggcggcacatgggaggatgccctctttcctggctgcgccatcgagctgattcacacctattccctggtgcatgacgatctgcccgccattgacaacgaccccctgcgcagaggccagcccgcctgccacgcggcctttgacgaggccacagccatctttgccggcgacgccctgcacaccctggcctttgaggtactctcatcggaccggtatatcttttttcagggaaagcggcggctggccctgatccacctgatctctcgggccacgggcaaccacggcatgatcgaaggccagatgcgggacatcctggcccagggcggcaacctgggtctggaccagttaaaagagctccaccggctcaaaaccggggcactgatcacggcgtcggtacatgccggggcacttacgggaaaggcaacggtgcgacagaccggaaagctgattgaatacgctgaaaacatcggcctggcctttcaggtggccgacgacctgctcaacgtggaaggagaccccctgctcaccggcaaatccattggcacggaccatgtccttggcaaggccacctttcccaatctgatgggcattgacgcctcccggaagtttgcggcccagctggtggaaaagagcttgcaagcgattgaatcccttggtataaaagcaaatccgctacgtgcggtggcaaaatatgtaatcgaaagaaaactttag

SEQ ID NO: 6304 - protein, 295 aa, Candidatus Desulfococcus oleovorans Hxd3
MKNLETYLARRQKAVNEALDRILADCVPGGRLFSAMRHSLKAGGKRLRPILCMAAAEAVGGTWEDALFPGCAIELIHTYSLVHDDLPAIDNDPLRRGQPACHAAFDEATAIFAGDALHTLAFEVLSSDRYIFFQGKRRLALIHLISRATGNHGMIEGQMRDILAQGGNLGLDQLKELHRLKTGALITASVHAGALTGKATVRQTGKLIEYAENIGLAFQVADDLLNVEGDPLLTGKSIGTDHVLGKATFPNLMGIDASRKFAAQLVEKSLQAIESLGIKANPLRAVAKYVIERKL

SEQ ID NO: 6305 - DNA, 900 bp, Escherichia coli B
  CDS (1)..(900): transl_table=11
atggactttccgcagcaactcgaagcctgcgttaagcaggccaaccaggcgctgagccgttttatcgccccactgccctttcagaacactcccgtggtcgaaaccatgcagtatggcgcattattaggtggtaagcgcctgcgaccttttctggtttatgccaccggtcatatgttcggcgttagcacaaacacgctggacgcacccgctgctgccgtagagtgtatccacgcttactcattaattcatgatgatttaccggcgatggataatgacgatctgcgtcgcggtttgccgacctgccatgtgaagtttggcgaagcgaacgcgattctcgctggcgacgctttacaaacgctggcgttctcgattttaagcgatgctgatatgccggaagtgtcggatcgcgacagaatttcgatgatttctgaactggcgagcgccagcggtattgccggaatgtgtggtggtcaggcgttggatttagacgcggaaggcaaacacgtacctctggacgcgcttgagcgtattcatcgtcataaaaccggcgcattgattcgcgccgccgttcgccttggcgcattaagcgccggagataaagggcgtcgtgctctgccagtactcgacaagtacgcagagagcatcggccttgccttccaggttcaggatgacatcctggatgtggtaggagatactgcaacgttgggaaaacgccagggtgccgaccagcaacttggtaaaagtacctaccctgcacttctgggtcttgagcaagcccggaagaaagcccgggatctgatcgacgatgcccgtcagtcgctgaaacaactggctgaacaatcactcgatacctcggcactggaagcgctagcggactacatcatccagcgtaataaataa

SEQ ID NO: 6306 - protein, 299 aa, Escherichia coli B
MDFPQQLEACVKQANQALSRFIAPLPFQNTPVVETMQYGALLGGKRLRPFLVYATGHMFGVSTNTLDAPAAAVECIHAYSLIHDDLPAMDNDDLRRGLPTCHVKFGEANAILAGDALQTLAFSILSDADMPEVSDRDRISMISELASASGIAGMCGGQALDLDAEGKHVPLDALERIHRHKTGALIRAAVRLGALSAGDKGRRALPVLDKYAESIGLAFQVQDDILDVVGDTATLGKRQGADQQLGKSTYPALLGLEQARKKARDLIDDARQSLKQLAEQSLDTSALEALADYIIQRNK

SEQ ID NO: 6307 - DNA, 888 bp, Pseudomonas putida GB-1
  CDS (1)..(888): transl_table=11
atgattggtacctaccaggccagttgccaggcgcgggtcgataccgccctcgaaccgctgttcatcgccccgaccaaagagctggagcgcctttacgccgccatgcgctacagcgtgatgaacggcggcaagcgcgtgcgcccgttgctggcctacgcggcctgcgaagccctgggcgcacccgccgaacaggccaacggcgccgcctgcgcggtcgagctgatccacgcttactcgctggtgcatgacgacctgccggccatggacgacgacgacctgcgtcgcggccagccaaccactcacaaagcgttcgatgaagcctgcgccatcctggctggcgacggcctgcagagcctggcgttcagcgccctgctcgacccacacctgagcccgcaggcagacaacatccgcctggccatggtccaggcattggccaaggctgccggcccggccggcatggtcggcggccaggccatcgacctcggctcagtgggcctgaagctggaccagcaggcgctggaattcatgcaccgacacaagaccggcgcgctgatcgaagccagcgtccgcctcggcgccctggccagtgcccgcgccgaacaagcgcagctcgatgccctgcaaacttatgcacaggccatcggcctggcattccaggtgcaggacgatatcctcgatgtggaaagcgataccgccaccctgggtaaacgccagggcgccgacatagcccgtgacaaaccgacctatccggccctgctgggcctggaagcggccaaggcctatgcaatcgaactgcgcgaccaggcgctgatcgcactgcaagggttcggtgaaacggccgagccgctgcgggcgctggcgcgctacatcgtcgaacgccgtaactga

SEQ ID NO: 6308 - protein, 295 aa, Pseudomonas putida GB-1
MIGTYQASCQARVDTALEPLFIAPTKELERLYAAMRYSVMNGGKRVRPLLAYAACEALGAPAEQANGAACAVELIHAYSLVHDDLPAMDDDDLRRGQPTTHKAFDEACAILAGDGLQSLAFSALLDPHLSPQADNIRLAMVQALAKAAGPAGMVGGQAIDLGSVGLKLDQQALEFMHRHKTGALIEASVRLGALASARAEQAQLDALQTYAQAIGLAFQVQDDILDVESDTATLGKRQGADIARDKPTYPALLGLEAAKAYAIELRDQALIALQGFGETAEPLRALARYIVERRN

SEQ ID NO: 6309 - DNA, 900 bp, Marinobacter sp. ELB17
  CDS (1)..(900): transl_table=11
gtgaacaccatcacccgcttgccagccagtgattttttgcaacactgccgcgctgagattgaccagcagctagccgattatatggatcaagccagcgcatcccagcgcctgcaggacgccatgcgctatggcttgctgggtggtggcaagcgcattcgtccagcgctttgcctagccgctgccgaagccgttggcggtcagcgccaaatagctctggcaccagcttgtgctctggagatgattcacgcgtactcgctgatgcacgacgacttgccggccatggacaacgatgatctgcgccgcggccgcgccaccgcccacatcgcattcgacgaatcttcggccatacttgctggcgacgctctgcaggcagaggcgtttcgggtactggccacggcgccgcggttaagcgctgaagtcaaactggctatggtaaaagccttggcgaacgcctgcggggcaaacggtatggtgggcgggcaggctattgatctggagtctgtggcaagaaccctgactctggaccagctagagaatatgcaccgccataagaccggcgctctgattgaagccagtgtgcaccttggcgcactggccggtggcgtaaaagaccccgcgttgctagacgccctggctcgttacgcccgcgcgctgggactggcgtttcaggtgcaggacgatttgctcgacatagaaggcgataccgaggtgatgggcaaaacccaaggctctgatatcgctcgcggcaaacccacctatcccgcactattggggccgaaaggcgcgcgcgaactcttggcaaggttgctagccgaggctcacgaaagcctgaaagggcttggcattcaggccgacgccctgcacgccatggcagattacatagtggctcgtagccactaa

SEQ ID NO: 6310 - protein, 299 aa, Marinobacter sp. ELB17
MNTITRLPASDFLQHCRAEIDQQLADYMDQASASQRLQDAMRYGLLGGGKRIRPALCLAAAEAVGGQRQIALAPACALEMIHAYSLMHDDLPAMDNDDLRRGRATAHIAFDESSAILAGDALQAEAFRVLATAPRLSAEVKLAMVKALANACGANGMVGGQAIDLESVARTLTLDQLENMHRHKTGALIEASVHLGALAGGVKDPALLDALARYARALGLAFQVQDDLLDIEGDTEVMGKTQGSDIARGKPTYPALLGPKGARELLARLLAEAHESLKGLGIQADALHAMADYIVARSH

SEQ ID NO: 6311 - DNA, 1283 bp, Helianthus annuus
  CDS (49)..(1119)
atttcttcttgttacaacaacaatcaaatcaaatccacttgtccaaccatgagacccatgagtttggttcattcatgttccatcttcaccggatcttcattcatcaaaacaacccccattaacaacaaacccactttcaagattcaccaaagacccacaattagatccacaatttctgcagcaattgttgaagaagaagtagttgagttgcaacaaaaacccaaacccactttcaatttcaacgcttacatgttgggaaagggtaattctgtccataaagctcttgatgaatcaattatgattaaaaacccaccaacaatacatgaagctatgaggtactctttacttgctggtgggaagcgcgtcaggcccattctctgtattgccgcgtgtgagctcgtcggaggggaggaggccaccgccatgccggcggcctgtgcggtggagatgatacacaccatgtctttgatacatgatgatcttccttgtatggataatgatgatttccgtagagggaagcccactaatcataaggtttatggggaagacgttgccgttttggcaggcgattcgctgctggcgtttgctttcgagtatgtttctagtaggacggaaggcgcatcgcctgcacgcgtcttggctgccatcggggagctcgccaagtcgattgggaccgaagggctggtggcagggcaagtggtggatattgcttcaaccgggggccaagatatcggattggatcagctagagtttatacacatacataaaaccgcagcattgttggaggcttctgttgtgttgggagctatcttgggtggtgggagtgatgcgcaggtggagaagctgaggacattcgcgcggtgcatcgggttgttgtttcaggtggtggatgatatacttgatgtgaccaagtcgtccgaggaattggggaaaaccgcagggaaagatttgttggtggataagacgacatatccgaaactgcttgggttggacaagtcgaggcagtttgcggaggagttgctggcggaggctaaacagcagctggaggagtttgaatcgcaggcggcggtggcgccgttgttggctctggcggagtatatagcttaccgccagaactaatgttgttgtattgtaacctaggttgctgttgtcatcaatttgattcatacctgtttgatgatgtaagattaattgacttgaagaaacaggaggcaaattagatttttcttttgattgcaatataccacctatattatcattctgaaaaaaaaaaaaaaaaaaaa

SEQ ID NO: 6312 - protein, 356 aa, Helianthus annuus
MRPMSLVHSCSIFTGSSFIKTTPINNKPTFKIHQRPTIRSTISAAIVEEEVVELQQKPKPTFNFNAYMLGKGNSVHKALDESIMIKNPPTIHEAMRYSLLAGGKRVRPILCIAACELVGGEEATAMPAACAVEMIHTMSLIHDDLPCMDNDDFRRGKPTNHKVYGEDVAVLAGDSLLAFAFEYVSSRTEGASPARVLAAIGELAKSIGTEGLVAGQVVDIASTGGQDIGLDQLEFIHIHKTAALLEASVVLGAILGGGSDAQVEKLRTFARCIGLLFQVVDDILDVTKSSEELGKTAGKDLLVDKTTYPKLLGLDKSRQFAEELLAEAKQQLEEFESQAAVAPLLALAEYIAYRQN

SEQ ID NO: 6313 - DNA, 1074 bp, Streptomyces ambofaciens
  CDS (1)..(1074): transl_table=11
gtgatttcgggcgtgatcgatgttcaggagatcgatctggatgccgtgcgggagcaggtcgacgccgtactggaggacttcctggaggacaaggcgggggcggccgcccgcaggagccacccgccggaggtcgcgaacaccctgcgggccttcctggctgcgggcggcaagcgggtgcgggctctgttgtgcgtggtgggctggcatgccgcaggcgggagcgaggacagagcggccgtcctgagagtggcggcgtcgctggaactgttcgtggcgttcgcgctcatccacgacgacatcatggacgactcggccgtccgccgcggccgccctgccgtgcaccgtgccctgtgtacgcgcctcgggcagtcgtcgcgggcggagcggctcggtgccggtggtgccctcctggtcggaaatctcgccctgatctgggcccaggagctgctgcataccgcggatctgcccctccggcggcgccgcacggtgcacgccctgtacgacgcgatgctggaggaggtgatgtacggccagtacctggacgtgatgggcaccggccccgacgacgacatcgacgcggcgctgcggatcgcccgttacaagaccgccaccgcgacggtcgagcgccccctgcagctgggagccgccgtcgccggcgccgatgacaccaccgtgaacctgtgcaccgcgctggggctgcccctgggggaggcgttccagatcagggacgacctgctggacgtcttcggcagcacggacggtgcgtgcacccccggcctgggggacctgcgggaagggaagcgcaccgttctcctcgctctgggcctgcgtgcggccaccccggctcagcagcgtcgcctgcgcagcctggtcgggcgggccgatctcgacgaacacggggcggccgaggtgcgggccatcctggaggagaccggcgcgcggcggcgcaccgaacacatgatcacctcccggtacgagcaggccctgcgggtgctggatgcggcggcgctgccgacggccgcgtcccgggcgctgcgcgcactggccgtcaccgccacccagtacacctcctga

SEQ ID NO: 6314 - protein, 357 aa, Streptomyces ambofaciens
MISGVIDVQEIDLDAVREQVDAVLEDFLEDKAGAAARRSHPPEVANTLRAFLAAGGKRVRALLCVVGWHAAGGSEDRAAVLRVAASLELFVAFALIHDDIMDDSAVRRGRPAVHRALCTRLGQSSRAERLGAGGALLVGNLALIWAQELLHTADLPLRRRRTVHALYDAMLEEVMYGQYLDVMGTGPDDDIDAALRIARYKTATATVERPLQLGAAVAGADDTTVNLCTALGLPLGEAFQIRDDLLDVFGSTDGACTPGLGDLREGKRTVLLALGLRAATPAQQRRLRSLVGRADLDEHGAAEVRAILEETGARRRTEHMITSRYEQALRVLDAAALPTAASRALRALAVTATQYTS

SEQ ID NO: 6315 - DNA, 1011 bp, Streptomyces maritimus
  CDS (1)..(1011): transl_table=11
gtgaccgtcgtcgggtcgttcgggctgagcgtgcgggaccaggctctggaagccgatgtccaggccggattggttgctgtcgaggaagggttgcttgaggcaaccaaaagcgaggtgccgttcatcacggaggccgcccagcacctggtgcgggccggcgggaaacggttccggccgctgctggtgatgctctcggcccagttcggagacccctacgcccccgggatcgtgccctcggccgtggtcgtggagctgacccacctggccacgctgtaccacgacgacgtgatggacgaggccgccgtgcggcgcggggtgcccagtgcgaacacccgctgggacaactcggtcgcggtcctcaccggcgacttcctgttcgcgcgtgcctcccagatcctcgccgacctcggccccgaggcggtccgcgtccaggccctcgccttcgaacggctggtcaccggtcagatcctggagacggccggcccgcaggacggccgcgacccggtcgaccactacctggacgtgctgagcggcaagacgggctccctggtggcggtatcctcccgtttcggcgcgatgatgtccggcgccgacgagacggtggtggaagtcctcacccagtacggcgaacggctcggcgtcgccttccagctcgccgacgacgtcctggacatcgcctccgactccgacgagtccggcaagacgcccggcacggacctgcgcgagggcatccccaccctgcccgtgctgcggctgcgcgagcgggcggcccggctggggctcgccgaggacctcgcgctgtgcgagctgctcgactccgacctgagcgacgacgcgcggcacgccgaggcgctgcgcctgctgcgcgcccacccggcgctggagcaggcccgccgggacaccgtccggtacgcggaggaggcccgggcggcgctcgcccccctgcgcgaatgcgacgcgaaggccgcgctggtggagctgtgcgtcacggtggtccaccgggccggctga

SEQ ID NO: 6316 - protein, 336 aa, Streptomyces maritimus
MTVVGSFGLSVRDQALEADVQAGLVAVEEGLLEATKSEVPFITEAAQHLVRAGGKRFRPLLVMLSAQFGDPYAPGIVPSAVVVELTHLATLYHDDVMDEAAVRRGVPSANTRWDNSVAVLTGDFLFARASQILADLGPEAVRVQALAFERLVTGQILETAGPQDGRDPVDHYLDVLSGKTGSLVAVSSRFGAMMSGADETVVEVLTQYGERLGVAFQLADDVLDIASDSDESGKTPGTDLREGIPTLPVLRLRERAARLGLAEDLALCELLDSDLSDDARHAEALRLLRAHPALEQARRDTVRYAEEARAALAPLRECDAKAALVELCVTVVHRAG

SEQ ID NO: 6317 - DNA, 1011 bp, Streptomyces lividans
  CDS (1)..(1011): transl_table=11
gtgaccgtcgtcgggccgttcgggctgagcgtgcgggaccaggctctggaagccgatgtccaggccggattggttgctgtcgaggaagggttgcttgaggcaaccaaaagcgaggtgccgttcatcacggaggccgcccagcacctggtgcgggccggcggggaacggttccggccgctgctggtgatgctctcggcccagttcggagacccctacgcccccgggatcgtgccctcggccgtggtcgtggagctgacccacctggccacgctgtaccacgacgacgtgatggacgaggccgccgtgcggcgcggggtgcccagtgcgaacacccgctgggacaactcggtcgcggtcctcaccggcgacttcctgttcgcgcgtgcctcccagatcctcgccgacctcggccccgaggcggtccgcgtccaggccctcgccttcgaacggctggtcaccggtcagatcctggagacggccggcccgcaggacggccgcgacccggtcgaccactacctggacgtgctgggcggcaagacgggctccctggtggcggtctcctgccggttcggcgcgatgatgtccggcgccgacgagacggtggtggacgtcctcacccagtacggcgaacggctcggcgtcgccttccagctcgccgacgatgtcctggacatcgcctccgactccgacgagtccggcaagacgcccggcacggacctgcgcgagggcatccccaccctgcccgtgctgcggctgcgcgagcgggcggcccggctggggctcgccgaggacctcgcgctgtgcgagctgctcgactccgacctgagcgacgacgcgcggcacgccgaggcgctgcgcctgctgcgcgcccacccggcgctggagcaggcccgccgggacaccgtccggtacgcggaggaggcccgggcggcgctcgccccgctgcgcgaatgcgacgcgaaggccgcgctggtggagctgtgcgacgcggtggtccaccgggccggctga

SEQ ID NO: 6318 - protein, 336 aa, Streptomyces lividans
MTVVGPFGLSVRDQALEADVQAGLVAVEEGLLEATKSEVPFITEAAQHLVRAGGERFRPLLVMLSAQFGDPYAPGIVPSAVVVELTHLATLYHDDVMDEAAVRRGVPSANTRWDNSVAVLTGDFLFARASQILADLGPEAVRVQALAFERLVTGQILETAGPQDGRDPVDHYLDVLGGKTGSLVAVSCRFGAMMSGADETVVDVLTQYGERLGVAFQLADDVLDIASDSDESGKTPGTDLREGIPTLPVLRLRERAARLGLAEDLALCELLDSDLSDDARHAEALRLLRAHPALEQARRDTVRYAEEARAALAPLRECDAKAALVELCDAVVHRAG

SEQ ID NO: 6319 - DNA, 1011 bp, Streptomyces mycarofaciens
  CDS (1)..(1011): transl_table=11
gtgaccgtcgtcgggccgttcgggctgagcgtgcgggaccaggctctggaagccgatgtccaggccggattggtcgcggtcgaggaagggttgcttgaggcaaccaaaagcgaggtgcccttcatcacggaggccgcccagcacctggtgcgggccggcggcaaacggttccggccactgctggtgatgctctcggcccagttcggcgacccctacgccccgggcatcgtgccctcggcggtcgtggtggagctgacccacctcgccacgctgtaccacgacgacgtgatggacgaggcgtccgtgcggcgcggcgtgcccagtgcgaacacccgctggggcaactccgtcgcggtcctcaccggcgacttcctcttcgcccgcgcctcccagatcctcgccgacctcggtcccgaggcggtccgcgtgcaggccctcgccttcgagcggctggtcaccggccagatcctggagacggcgggcccccaggacgggcgggacccggtcgaccactacctggacgtgctcggcggcaagacgggatcgctggtggcggtctcctgccggttcggcgcgatgatgtccggcgccgacgagacggtcgtcgacgtcctcacccagtacggcgagcggctcggcgtcgccttccagctggcggacgacgtcctggacatcgcctccgactcccacgagtccggcaagacccccgggaccgacctgcgcgagggcatcccgaccctcccggtgctgcggctgcgcgagcgggcggcccggctggggctggccgaggacgtcgccctgtgcgagctgctggactccgacctgtccgacgacgcgcggcacgcggaggccctgcggctgctgcgcgcccaccccgcgctggagcaggcgcgcaaggacaccgtgcgctacgccaaggacgcccgggcggcgctggccccgctgcgggagtgcgaggcgaagtcggcgctggtggagctgtgcgacgccgtggtccaccgggccggctga

SEQ ID NO: 6320 - protein, 336 aa, Streptomyces mycarofaciens
MTVVGPFGLSVRDQALEADVQAGLVAVEEGLLEATKSEVPFITEAAQHLVRAGGKRFRPLLVMLSAQFGDPYAPGIVPSAVVVELTHLATLYHDDVMDEASVRRGVPSANTRWGNSVAVLTGDFLFARASQILADLGPEAVRVQALAFERLVTGQILETAGPQDGRDPVDHYLDVLGGKTGSLVAVSCRFGAMMSGADETVVDVLTQYGERLGVAFQLADDVLDIASDSHESGKTPGTDLREGIPTLPVLRLRERAARLGLAEDVALCELLDSDLSDDARHAEALRLLRAHPALEQARKDTVRYAKDARAALAPLRECEAKSALVELCDAVVHRAG

SEQ ID NO: 6321 - DNA, 1248 bp, Solanum lycopersicum
  CDS (1)..(1248)
atgatattttcaaagggtttagctcagatttccagaaaccgcttcagcagatgccgatggttattttcattacgtcccatcccacaattacatcaatccaatcacatccacgatcctccaaaggttctgggttgcagagtaattcattcatgggtttctaatgctcttagtggtattgggcaacaaattcatcagcaaagcactgctgtagcagaggagcaagtggacccattttcccttgttgcagatgaattatcccttctgacaaacaggctgagatcaatggtagtcgcggaggtcccaaagctggcttcagctgctgaatatttcttcaaactgggagtagaaggaaagaggtttcgaccaacagttttgctattgatggcaactgcattgaacgtacagattcctagatctgctccgcaggtggatgttgattctttttccggggatttgcgtacaaggcagcagtgtatagctgagatcactgagatgatccatgttgctagcctacttcatgatgatgtactggatgatgctgacacaagacgtgggataggttctttaaactttgtgatgggaaataagctagctgtactagccggagactttttgctttcccgagcatgtgtggcacttgcctccttgaagaacacagaggttgtatgtcttctggcaactgttgtggaacatcttgttactggagagacaatgcaaatgacgacttcttctgatgaacgttgtagcatggagtattatatgcagaaaacatattacaagactgcatcattgatttcaaatagttgcaaagcaattgcactacttgctgggcatagtgctgaagtctccgtgctggcttttgactacggaaaaaatctgggattggcatttcaattaatagatgatgttcttgatttcacgggcacatctgcaactcttggcaagggttcattgtctgatattcgtcatgggattgtaactgccccgatattgtatgccatggaggaatttcctcaactgcgtacgctggtggaccgaggttttgatgatcctgtcaatgtggagatcgctctggactaccttgggaagagcagagggatacagagaacaagagaacttgcgagaaagcatgctagccttgcgtcagcggcaattgactctcttccagaaagcgatgacgaggaagttcagagatcaagacgagcacttgtagaacttactcacagagtcatcacaagaacaaaatag

SEQ ID NO: 6322 - protein, 415 aa, Solanum lycopersicum
MIFSKGLAQISRNRFSRCRWLFSLRPIPQLHQSNHIHDPPKVLGCRVIHSWVSNALSGIGQQIHQQSTAVAEEQVDPFSLVADELSLLTNRLRSMVVAEVPKLASAAEYFFKLGVEGKRFRPTVLLLMATALNVQIPRSAPQVDVDSFSGDLRTRQQCIAEITEMIHVASLLHDDVLDDADTRRGIGSLNFVMGNKLAVLAGDFLLSRACVALASLKNTEVVCLLATVVEHLVTGETMQMTTSSDERCSMEYYMQKTYYKTASLISNSCKAIALLAGHSAEVSVLAFDYGKNLGLAFQLIDDVLDFTGTSATLGKGSLSDIRHGIVTAPILYAMEEFPQLRTLVDRGFDDPVNVEIALDYLGKSRGIQRTRELARKHASLASAAIDSLPESDDEEVQRSRRALVELTHRVITRTK

SEQ ID NO: 6323 - DNA, 1300 bp, Solanum lycopersicum
  CDS (39)..(1130)
atacatattttttaaagcttagctttttggaaaagaaaatgagatctatgaaccttgttgattcatggggtcaagcttgtctagttatcaatcaatctttaccttacaattcgtttaatggattgatgaaaatcaattcgaaaaatcgaaaaattttgaaacagagtttatcttatagaacattttcatctctaactgtttcagctattgctaccaatgagaaagttgttatggaaaaagaagaatttaatttcaaggtttacgtagctgaaaaggcgatttgtgtaaataaagctttggatgaggctataatggtaaaagacccacctaagatccatgaagcaatgcgttattcgcttctcgccggcgggaagagagtccggccgatgctctgtcttgctgcctgtgaacttgttgggggaaaccaaggaaatgccatggcggctgcttgtgctgttgagatgatacatactatgtctctaattcatgatgatttgccttgtatggatgacgacgatctccgccgtggaaagccgacgaatcataaagtgtacggtgaggatgtggcggtcctcgccggagatgcgctacttgctttcgcattcgagtacctcgctaccgctacaaccggagttcctccgtcgaggatcctcgttgctgtcgccgaattggcgaaatctgttggaacggaagggttagtagctggacaagtagcggatttagcttgtactggtaaccctaatgtgggattagaaatgcttgaattcattcacatacacaaaacggcggcgttgctagaagcttccgttgtaatcggagcaatcctcggcggcggagctgatgaagaagtggataagttaaggagatttgcccaatgcatcggtttattgtttcaggtagttgatgatatccttgacgtgacaaagtcatcgtcggagctcggaaaaaccgccggaaaagatttggcggttgataaaacgacgtatccgaagctgctgggattggaaaaggctaaggaatttgcggcggagctcaacggcgaagctaaacaacagctggcggcgtttgattcacacaaagctgctccattgattgctttagcagattacattgctaatcgtcaaaattaagattttttgtggaaaatttttagttttatgaagtaattgaatgaatgtagttcttcataatgtgatttgaatcttgatttatcaaatgaaaatgaaaatgaaggtgatatattatattattaataaataaagtcaattttgaatcgtaaattcaaaaaaaaaaaaaaaaa

SEQ ID NO: 6324 - protein, 363 aa, Solanum lycopersicum
MRSMNLVDSWGQACLVINQSLPYNSFNGLMKINSKNRKILKQSLSYRTFSSLTVSAIATNEKVVMEKEEFNFKVYVAEKAICVNKALDEAIMVKDPPKIHEAMRYSLLAGGKRVRPMLCLAACELVGGNQGNAMAAACAVEMIHTMSLIHDDLPCMDDDDLRRGKPTNHKVYGEDVAVLAGDALLAFAFEYLATATTGVPPSRILVAVAELAKSVGTEGLVAGQVADLACTGNPNVGLEMLEFIHIHKTAALLEASVVIGAILGGGADEEVDKLRRFAQCIGLLFQVVDDILDVTKSSSELGKTAGKDLAVDKTTYPKLLGLEKAKEFAAELNGEAKQQLAAFDSHKAAPLIALADYIANRQN

SEQ ID NO: 6325 - DNA, 1267 bp, Solanum lycopersicum
  CDS (49)..(1146)
acaccattgccataataattctcttcaaaattcctaaaaactcatacaatggcatttttagctaccatttctggccttgacaatctgttcctttctaataccccaaacaataactttgctttcagtagaaaactcccaccaagccaatcttacagtttccttcacaagaaaatacacgctagcgatgttgcgaactcgttccaaacttttcaagtcaaggaacgagatgtttcatccaaggcagagaaattcatcttgcctgagtttgagtttcaagaatacatggtaacgaaggcaatcaaggtaaacaaagcactagatgaagcaataccaatgcaagagcctataaaagttcatgaagccatgaggtactcacttctagctggaggaaaacgtgtccggccgatcctctgcatggcttcttgtgaagttgtaggaggggatgaatccttagctatacctgcagcttgcgcagttgagatgatccataccatgtcactcgtccatgatgatcttccctgcatggacaacgatgatctacgtcgtggcaagcccacgaaccataagatttttggagaaaacactgcagttcttgcaggggatgcacttttatctttggcctttgaacatgtggctaccaagactcagaatgtgccaccccaaagagtggtccaagccattggggaattgggttcagctgttggctcagaagggctcgtggcagggcagattgtggacttggcgagtgaaggaaaacaagttagcctaactgaactggagtacattcaccaccataagacgtcgaagcttttggaggctgctgtggtttgtggggcaataatggggggaggaaatgaggttgatgtggagcgaatgaggagctatgctaggtgcattggactcttatttcaagtggtagatgatattcttgatgttaccaagtcatcagatgagctgggaaagacagcgggtaaggacctaataacagataaggctacatatcctaagttgatggggctagaaaaggctcgacaatatgccggtgagctgatggctaaggccatgaatgagctaagctacttcgactatgcaaaggcagcacctctttatcatattgctagttatattgcaaatcgacagaattgataggctgaatagttcatgatgaagacgctgtatataccttaaagaattgtctgtataagtaaaggtaagtatgatggaactgatctttgtgtcgtaaaaaaaaaaaaaaaaaaaaaaaaaa

SEQ ID NO: 6326 - protein, 365 aa, Solanum lycopersicum
MAFLATISGLDNLFLSNTPNNNFAFSRKLPPSQSYSFLHKKIHASDVANSFQTFQVKERDVSSKAEKFILPEFEFQEYMVTKAIKVNKALDEAIPMQEPIKVHEAMRYSLLAGGKRVRPILCMASCEVVGGDESLAIPAACAVEMIHTMSLVHDDLPCMDNDDLRRGKPTNHKIFGENTAVLAGDALLSLAFEHVATKTQNVPPQRVVQAIGELGSAVGSEGLVAGQIVDLASEGKQVSLTELEYIHHHKTSKLLEAAVVCGAIMGGGNEVDVERMRSYARCIGLLFQVVDDILDVTKSSDELGKTAGKDLITDKATYPKLMGLEKARQYAGELMAKAMNELSYFDYAKAAPLYHIASYIANRQN

SEQ ID NO: 6327 - DNA, 1119 bp, Medicago truncatula
  CDS (1)..(1119)
atgagtgctgtgaatcttaacacatggacacactccaatttcatgtgcaatcaagttactactactgctacaactagatccagatccagaatcccatctttctattttaccaaaatacccatttcagtttcacccattaaaccatcaaaacccaattcttcttcattttctttctctgtttcttcattacttacaaaacaagaaccaatagaagcagaagagcaaaacccaatcttcaatttcaaatcctacatgatagaaaaagcaactagggttaacaaagccttagacgacgccgtttcattacgcgaaccgttaaaagttcatgaagccatgcgttactctcttctcgccggcggaaaacgcgttcggccggttctctgtttagccgcctgtgaactcgtcggaggaaccgaaccgatggcgatgccagccgcctgcgccgttgaaatgatccacacgatgtctctcatccacgatgaccttccttgtatggataacgatgatctccggcgaggtaaacctacaaaccacaaagtcttcggagaagacgttgctgttctcgccggagatgctcttctcgcttttgctttcgaacatattgccgtctccaccgttgatgtttctccggcgcgaattgtccgtgcaatcggtgaattagcgaaatcaataggctcggaaggactcgttgcgggacaagttgttgatataaactcagaaggtttatccgatgtcggactcgaacggcttgaattcattcatttgcataaaactgcagctttgttagaaggtgctgttgttcttggtgcaatattaggtggtggaagtgatgaagatgttgaaaaactgcgaaaattcgcgacatatattggtttattgtttcaggttgttgatgatattcttgatgtgacgaaatcttcacaagagttagggaaaactgctgggaaagatttggtagctgataaggttacttatcctaagcttttagggattgagaaatcgaaagagtttgctgagaaattgaaccgtgatgcacaagaacaactttctgggtttgatttgaataaatctgctcctttgattgctttggctaattacattgcttataggcaaaactag

SEQ ID NO: 6328 - protein, 372 aa, Medicago truncatula
MSAVNLNTWTHSNFMCNQVTTTATTRSRSRIPSFYFTKIPISVSPIKPSKPNSSSFSFSVSSLLTKQEPIEAEEQNPIFNFKSYMIEKATRVNKALDDAVSLREPLKVHEAMRYSLLAGGKRVRPVLCLAACELVGGTEPMAMPAACAVEMIHTMSLIHDDLPCMDNDDLRRGKPTNHKVFGEDVAVLAGDALLAFAFEHIAVSTVDVSPARIVRAIGELAKSIGSEGLVAGQVVDINSEGLSDVGLERLEFIHLHKTAALLEGAVVLGAILGGGSDEDVEKLRKFATYIGLLFQVVDDILDVTKSSQELGKTAGKDLVADKVTYPKLLGIEKSKEFAEKLNRDAQEQLSGFDLNKSAPLIALANYIAYRQN

SEQ ID NO: 6329 - DNA, 1225 bp, Stevia rebaudiana
  CDS (30)..(1115)
accatcaatttctcaaatttctaattaaaatggctcttgtaaatcccacagctttgttctatggaacctccataagaaccagacccacaaacttgctcaacccgacccaaaaacttcgacccgtttcctcttcttctttgccttccttctcttcagtttctgcaatcttgacggaaaaacaccaatcaaacccatcagaaaacaataacttgcaaacccatctcgaaacaccattcaatttccactcttacatgctggagaaagcaaacatggtgaatgaagctctggacgcctcggttccactcaaagacccgataaagatccatgaatccatgcggtactcccttctagctggcgggaaacgcatccgaccgatgatgtgcatcgccgcttgcgaaatagtcggaggcaacatattaaacgccatgccagctgcatgcgcggtcgagatgattcacaccatgtcactagttcatgacgaccttccatgcatggataacgacggcttccgacgtggaaaaccaacaagccacaaggtgtacggtgaagaaatggcggttctaaccggggacgcgttgctctcattatccttcgaacatatcgcgaccgcgacaaaaggcgtatccaaagacaggatcgtccgagtcattggtgaactcgcaaggtccgttggctcggagggtttggtcgccggtcaggtggttgatattttatccgaaggggctgatgttgggttagaccacttggagtatattcatatacacaagactgcaatgttgcttgagagctcggtcgtgatcggcgcgatcatgggcggtgggtctgaccaacagatcgaaaagttgcgaaagtttgcgagatcgattggtttgttgtttcaggtggtagatgatattcttgatgtcacaaagtcgactgaggaattggggaaaacggcgggaaaagatttgctgacggacaagacaacgtatccgaagttgttggggatcgaaaaatcgagagaatttgcggagaaattaaacaaggaagcgcaagaacaattgtcggggtttgatcgccgcaaggcggctccgttaattgcccttgctaattacaatgcttataggcaaaactgatccattatttgtttgtattacaatttcaaaaggttacgtgtatttgaataactgaattatgctaagaatcgaatcactttgaccaagtttataacccaaatacacattag

SEQ ID NO: 6330 - protein, 361 aa, Stevia rebaudiana
MALVNPTALFYGTSIRTRPTNLLNPTQKLRPVSSSSLPSFSSVSAILTEKHQSNPSENNNLQTHLETPFNFHSYMLEKANMVNEALDASVPLKDPIKIHESMRYSLLAGGKRIRPMMCIAACEIVGGNILNAMPAACAVEMIHTMSLVHDDLPCMDNDGFRRGKPTSHKVYGEEMAVLTGDALLSLSFEHIATATKGVSKDRIVRVIGELARSVGSEGLVAGQVVDILSEGADVGLDHLEYIHIHKTAMLLESSVVIGAIMGGGSDQQIEKLRKFARSIGLLFQVVDDILDVTKSTEELGKTAGKDLLTDKTTYPKLLGIEKSREFAEKLNKEAQEQLSGFDRRKAAPLIALANYNAYRQN

SEQ ID NO: 6331 - DNA, 1305 bp, Chrysanthemum x morifolium
  CDS (176)..(1213)
  misc_feature (523)..(523): y is t or c
acgcggggattgcataatgacgagttttcttgttattctagcattgtcatccaaaaccacaacgttatcatcaccatcatccaccatgtcttggtaaaactaaaaaaatcctctcattttcacaaatctttacacaaaccaaatcccccaaaaaaatccatcatcagaaaacaaaatgattcttattaatcccacatctttgttctatggagcctcacttaaacccagatctacaagcttcatttaccagacccgaaaatcacaatccgtttcaatttcagcacttttgaccaaagaacagcaatcaaaacatacccaattggaatctgaatttgatttcaagtcttacatggtacagaaagcaaatacggtaaaccaagccttagacgacgccgtaccaataagagagccgaaaaaaattcatgaatctatgcgctactcgcttttagcaggcggaaaacgtgtccgaccaatattatgtctcgcttcatgcgaacttgtcgggggagaccaaatatcagcyatgccagccgcatgtgctgttgagatgatacatactatgtcattaatgcacgatgatcttccttgtatggataacgatgatttccgtagagggaagcctactaaccatatagtttatggtgaggaaatagctgtattagcaggtgatgctttgttgtcatttgctttcgagcatgtggctactgctactaaagatgtttcagctgagagaattgtccgtgctattggcgaattagccaaatgtatcggctctgaagggcttgttgctggacaagttgtggatatttgttctgaaggtgctgatgtcggtttggagcatttggagtttattcatttacataagactgctgctttgcttgagggttctgttgtgctaggtgcgattatgggtggtgggtcggatgttgaggttgaaaggctaagaaagtttgttagatcaattgggttgttgtttcaggttgttgatgacatacttgatgtgacgaaatcttctgaggagttggggaaaactgctggtaaagatctggtggctgataagacgacgtatcccaagttgttggggattgagaaatcgcgcgaatttgctgagaaattgaataaggaagcacaggaacagttgaaggagtttgatattcgaaaagctgcgccgttaattgctcttgctaattatattgcatatagggacaattgaatcgattattaatccatttgtaatttgaattaattggtatcttatatgaatctgaattgcaaaaggaaaaaaaaaaaaaaaaaaaaaaaaaa

SEQ ID NO: 6332 - protein, 345 aa, Chrysanthemum x morifolium
MILINPTSLFYGASLKPRSTSFIYQTRKSQSVSISALLTKEQQSKHTQLESEFDFKSYMVQKANTVNQALDDAVPIREPKKIHESMRYSLLAGGKRVRPILCLASCELVGGDQISAMPAACAVEMIHTMSLMHDDLPCMDNDDFRRGKPTNHIVYGEEIAVLAGDALLSFAFEHVATATKDVSAERIVRAIGELAKCIGSEGLVAGQVVDICSEGADVGLEHLEFIHLHKTAALLEGSVVLGAIMGGGSDVEVERLRKFVRSIGLLFQVVDDILDVTKSSEELGKTAGKDLVADKTTYPKLLGIEKSREFAEKLNKEAQEQLKEFDIRKAAPLIALANYIAYRDN

SEQ ID NO: 6333 - DNA, 1157 bp, Lupinus albus
  CDS (136)..(1086)
cacaaaaccactagattcagatcttcaagttttcaaatcttccatagctttacaaagttacccatttcttttataagcatcgaaaaaccaaaaaggtcacaactttcatatttttcttctttctctatctctgcaatgctcactaaagaagataccgttaaagacaaagaagaagaagaagaagaagaagagaaacccagattcaatttcaacttgtacatggttgagaaatcacgttcagtgaaccaagctttaaacgacgccgtttcgttacgtgagccacataaaattcacgaagctatgcggtattctctactcgccggcgggaagcgcgtgaggccggtgttatgcattgcagcctgtgaagttgtcggcggcaatgaatctacggcgatggccgccgcatgttcaattgagatgatacacactatgtcccttattcatgatgatctcccctgcatggacaacgacgatcttcgccgagggaaacccacaaaccacaaggttttcggcgaaaatatcgctgtccttgcaggggatgcattattggcatttgcctttgagcatatcgccgtttcaacctccggtgtgtcaccggagagaattatcggcgcaatcggggagcttgcgaaatcgatcggaactgaaggccttgttgcaggacaagtagtggatattaattcagaagggttatgtgatattgggttagagaaattggaatttattcatcttcataaaacagcagcacttctagaaggttctgttgttgttggagcaattcttggtggtgggtgtaatgaagaggttgaaaagttaaggatgtttgctaggtacataggattgatgtttcaggttgttgatgatgttcttgatgttactaagtcttcaaaggaattgggaaaaactgcagggaaggatttggtggctgataaggttacttaccctaagcttttagggattgagaaatctaatgagtttgctcagaaattgaatagggatgcacaagaacagctttctggttttgatccagttaaggttgctcctttgattgcattagctaattacattgcttatagcccaaattaaactctcttgtgtaacaatttgttgtttagaaaaggttaaatttatggcaattattgagtttacttattacc

SEQ ID NO: 6334 - protein, 316 aa, Lupinus albus
MLTKEDTVKDKEEEEEEEEKPRFNFNLYMVEKSRSVNQALNDAVSLREPHKIHEAMRYSLLAGGKRVRPVLCIAACEVVGGNESTAMAAACSIEMIHTMSLIHDDLPCMDNDDLRRGKPTNHKVFGENIAVLAGDALLAFAFEHIAVSTSGVSPERIIGAIGELAKSIGTEGLVAGQVVDINSEGLCDIGLEKLEFIHLHKTAALLEGSVVVGAILGGGCNEEVEKLRMFARYIGLMFQVVDDVLDVTKSSKELGKTAGKDLVADKVTYPKLLGIEKSNEFAQKLNRDAQEQLSGFDPVKVAPLIALANYIAYSPN

SEQ ID NO: 6335 - DNA, 909 bp, Enterobacter agglomerans
  CDS (1)..(909): transl_table=11
atgacggtctgcgcaaaaaaacacgttcaccccactcgcagtgctgctgagcaattactggctgatattgatcggcggcttgagcagttattgcctgtcgagggagaacgggattttgtaggtgccgcgatgcgtgagggcgcgctggcaccgggtaaacgtattcgcccgatgctgttgttgctcacagcacgcgatctgggctgcgctgtcagccacgagggattgctggatatcgcctgcgccgtggaaatggtgcacgcggcatcgttgattcttgatgatatgccctgtatggatgatgcgcagatcgtcggcggccgccctaccgttcactgtcagtacggcgagcatgtggcaatactggcggcggtcgccttactgagcaaagcctttggggtcattgctgatgcagatggcctgaccgcgctggcaaaaaaccgcgcagtgtcagaattatcaaacgccattggtatgcaaggtttggtacagggtcagtttaaggatctgtcagaaggcgataagcgccgcagcgctgaagccattttgatgacgaaccactttaaaaccagcaccctgttttgcgcgtctatgcagatggcctcaattgtggcgaatgcctccagcgaacgacgcgattacctacaccgtttttcgcttgatctcggccaagcgtttcaactgctggacgacttaacggatggcatggctgacacgggtaaggacatcaatcaggatgaaggcaaatcgaccctggtcaatttattaggctccagagcagttgaagagcgtctgcggcacagtctgcatctcgccagtgagcacctctcagccgcgtgtcaaaacggtcattctactcaacaatttatccaggcctggtttgacaaaaaactcgctgccgtcagttaa

SEQ ID NO: 6336 - protein, 302 aa, Enterobacter agglomerans
MTVCAKKHVHPTRSAAEQLLADIDRRLEQLLPVEGERDFVGAAMREGALAPGKRIRPMLLLLTARDLGCAVSHEGLLDIACAVEMVHAASLILDDMPCMDDAQIVGGRPTVHCQYGEHVAILAAVALLSKAFGVIADADGLTALAKNRAVSELSNAIGMQGLVQGQFKDLSEGDKRRSAEAILMTNHFKTSTLFCASMQMASIVANASSERRDYLHRFSLDLGQAFQLLDDLTDGMADTGKDINQDEGKSTLVNLLGSRAVEERLRHSLHLASEHLSAACQNGHSTQQFIQAWFDKKLAAVS

SEQ ID NO: 6337 - DNA, 1317 bp, Anthonomus grandis
  CDS (1)..(1317)
atgttttcggtgaaattgtgccgaaaccggtcttgccgggagttaatcaaaaacattagacggggtattacgaaaacttcgacggatagtaatagcgacgcgatctcgcgggcacaggaccataaccaaatgaataattttaatttggaggggccgagtagtcaataccacacgaatgttaacaacaaaaggtggcataaacaaatgcaatttaataatttaagggccctttcaacaatccaacaaacgatcccaaaaccgtcacactccagcaccttggtgtccaaggaacaatccagggactttatggctctatttccagacttggtgagagaactcaccgaactgggaaggaatccagagttgcccgatgtgatgcgcagagttgctagggtactgcaatataatgttccaaacgggaagaaaaatagaggcttaatactaattagtgcgtacaagatgttggaagatcccaagaatttaacaccggagaatattaagcttgctagcgttttgggatggtgtttggaaatgattcattcctgtttccttgttctggacgatataatggacaattcggagacccgtagggggtcattgtgctggtaccgccaaaacggcattgggttatcggcaataaacgacggactcatactggaaaacgctgtttacaccctacttaaaatgcaccttagggaccatccagcgtacgtcccaataatagaactcttccatgaaactgtttccaagaccaccttgggtcagtgcttagactctatgtgtctagattccgatggaaaacccaagttagaaatgttttccatgagcagatacacctcgatcgtaaaatacaagactgcttactatagtttccatatgcctgtggctgtggcgatgtacttggctggaatgaacgatccagagcagcacaggcaagcgaagaccattttgctggaaatgggcgaatttttccagattcaggacgacttcctggattgtttcggtgatccagctgtaactggcaaaaaaggcaccgatatccaagagggcaaatgctcctggttggccgtggtagctctccaaagagcttcggccgcccaaaggaagatcatggaggaacactatggagtggatgatcccaattctgtggcgatcattaagaaactttatgaagatttgagcttacccaacacatatgccatttatgaggaggaatcttacaatatcattaagactcacattcagcaaatttctaaagggctgcgtcacgacctgttctttagtataatggagaagttgtacaaacgggagtgttaa

SEQ ID NO: 6338 - protein, 438 aa, Anthonomus grandis
MFSVKLCRNRSCRELIKNIRRGITKTSTDSNSDAISRAQDHNQMNNFNLEGPSSQYHTNVNNKRWHKQMQFNNLRALSTIQQTIPKPSHSSTLVSKEQSRDFMALFPDLVRELTELGRNPELPDVMRRVARVLQYNVPNGKKNRGLILISAYKMLEDPKNLTPENIKLASVLGWCLEMIHSCFLVLDDIMDNSETRRGSLCWYRQNGIGLSAINDGLILENAVYTLLKMHLRDHPAYVPIIELFHETVSKTTLGQCLDSMCLDSDGKPKLEMFSMSRYTSIVKYKTAYYSFHMPVAVAMYLAGMNDPEQHRQAKTILLEMGEFFQIQDDFLDCFGDPAVTGKKGTDIQEGKCSWLAVVALQRASAAQRKIMEEHYGVDDPNSVAIIKKLYEDLSLPNTYAIYEEESYNIIKTHIQQISKGLRHDLFFSIMEKLYKREC

SEQ ID NO: 6339 - DNA, 1083 bp, Arabidopsis thaliana
  CDS (1)..(1083)
atggctaatactgttcatctcagctcatcctctctcttcatccaaaccagaggacgaaaatacaactccatattatcattcaacaatctccaaaaacgcactgttttgtctctctcttgtgctctcacctcacaaggcggcaaagacatgattccaccaaaaggaaaaagcaatgatcgcaactttgcctttgacttcaagtcttatatgatccgtaaagccgaatctgtaagtatggctctcaacgtttcagtacctccccaagatcccctcgcaatccaagaggcggtgcggtactcattactagcgggcggaaaacgtgtgcgacctctgctctgcattgctgcctgtgagcttgtgggaggcgacgaggctactgccatgtcagccgcttgcgcggttgagatgatccacacgagctctctaatccatgacgaccttccgtgcatggacgatgccgacctccgtagaggcaagcccaccaaccacaaggtatttggagaacacatggcggttttggcgggcgatgcactccttgctttggcgtttgagcacatgacggttgtgtcaagtgggttggttgctcctgagaggatgatccgttctgtaactgagctggcaaaggccatcgggacaaaagggttagtggctgggcaagtgagtgacttatgtagccaaggattgaatccatatgacgtcgggttggagcgtctagaattcatccacctacacaaaacggccgccttgttggaggcagcggcggttttaggagctataatcggaggtggaacagaggaagagatccaaaagctaagaaagtatgggagatgtattgggcttttgtttcaggtagttgatgatattattgatgtaacagaatctactgaggaattgggtaagacagccggaaaagacgtaaaggcaagaaagctgacgtatccaaggctgataggtttggagagatccagggaagttgcagagaaactgagaagagaagcagcggaacagcttctagggtttgattccaataaggtggcgcctctggtggctcttgctagctacattgcttgcagacacaactga

SEQ ID NO: 6340 - protein, 360 aa, Arabidopsis thaliana
MANTVHLSSSSLFIQTRGRKYNSILSFNNLQKRTVLSLSCALTSQGGKDMIPPKGKSNDRNFAFDFKSYMIRKAESVSMALNVSVPPQDPLAIQEAVRYSLLAGGKRVRPLLCIAACELVGGDEATAMSAACAVEMIHTSSLIHDDLPCMDDADLRRGKPTNHKVFGEHMAVLAGDALLALAFEHMTVVSSGLVAPERMIRSVTELAKAIGTKGLVAGQVSDLCSQGLNPYDVGLERLEFIHLHKTAALLEAAAVLGAIIGGGTEEEIQKLRKYGRCIGLLFQVVDDIIDVTESTEELGKTAGKDVKARKLTYPRLIGLERSREVAEKLRREAAEQLLGFDSNKVAPLVALASYIACRHN

SEQ ID NO: 6341 - DNA, 1302 bp, Ips pini
  CDS (1)..(1302)
atgttctcgatgaaggcgtgcagaaatcgcccttgtacgcggtggctgaaggagttccgcaggaacatcagcaaaacgtcgacggacaaaaacagcgacgccatcatcaggagtcaggacaagatgcaacacgcatcgaagacgcacgaagtcgcctttgagaaaaatctcagctacaccaggtggatgaaacagatgcaacacaataacattagggctttatcaacaattcaacaaactctagtgcgtccacaacaatccagttctctggcctccaaggagcaatccagggattttatggcccagtttccggatattatcagggaactaacggaagtgggaagaaaccaagaattgcccgaagttatgaaacgttacgctagggttcttcagtacaacacgccaaacggaaagaaaactcgcggactgattacaatttccacctacaaaatgttggaggaccccgccaaaattaccaccgaaaatctgaaaaaagccggtattttgggatggtgcatcgaaatgttgcacacatacttcctgatcattgatgacatcatagatcactcagacacgcgacgaggcgccatctgttggtaccgtcaaccaggtatcggtctgactgccgtatacgatgctgtcatgatggagaacggtgtgtacctcctactgaaaaggcatttcaaagatcatcccatgtacaccaatatcatcgagctgttccacgacatggccttgaaaacgtcactaggccaaagcctggacactatgtgtctcaatgatgatggtaaacccaaattggacattcacaatgagcaggacacctccatagtcaactacaagacgtcgtactatagtttctatcttccggtggccgccgccatgtatttgttgggcatggacgatccagagcaacacagacaggcgcgcactattttactcgatatgggacagttcttccaaatccaggatgactttctggactgtttcggtgatccgaatgtgactgggaaattgggaacggacattcaagacggtaaatgttcctggttggctgtgatggcacttcaaaggtccactccagcccaaagaaagatcatggaagaacattatggcaggtccgaacctgaatcagtagcaataatcaaacagctctacgaagatctaactttaccgaacacgtacgccatctatgaagaggaaagcttcaacataatcaaaactcacatccagcagatttctaaggactgcgtcacgatcttttctaaacattatggagaagctttcaagcgcgagagttaa

SEQ ID NO: 6342 - protein, 433 aa, Ips pini
MFSMKACRNRPCTRWLKEFRRNISKTSTDKNSDAIIRSQDKMQHASKTHEVAFEKNLSYTRWMKQMQHNNIRALSTIQQTLVRPQQSSSLASKEQSRDFMAQFPDIIRELTEVGRNQELPEVMKRYARVLQYNTPNGKKTRGLITISTYKMLEDPAKITTENLKKAGILGWCIEMLHTYFLIIDDIIDHSDTRRGAICWYRQPGIGLTAVYDAVMMENGVYLLLKRHFKDHPMYTNIIELFHDMALKTSLGQSLDTMCLNDDGKPKLDIHNEQDTSIVNYKTSYYSFYLPVAAAMYLLGMDDPEQHRQARTILLDMGQFFQIQDDFLDCFGDPNVTGKLGTDIQDGKCSWLAVMALQRSTPAQRKIMEEHYGRSEPESVAIIKQLYEDLTLPNTYAIYEEESFNIIKTHIQQISKDCVTIFSKHYGEAFKRES

SEQ ID NO: 6343 - DNA, 819 bp, Thermotoga sp
  CDS (1)..(819): transl_table=11
atgaagaaggagaaagttgaagaaagaatacgcgagattttgaggcctggatgggatcttctcacagaagaagccatgctgtactccgcgacggttggaggaaagaggatccgtcctctcctcgtcttgacactgggtgaggatttgggagtggaagaggaaaagcttctcgatgtggcggtggccgttgaactctttcacacggcttctctgatacacgatgatcttcccccaatagataacgcggattttcgaagagggaagccttcttgtcataggacctatggtgaagatatcgcccttcttgcgggagatggtctgttcttcctcgctttttctcagatatctaaaatcggaaattcaaagatttttgaagagttttcggaaacggcctacaaacttcttttgggggaagcgatggatgtggaattcgaaagaagaaagatggaaatctcgcaggagatggtggagagaatgtacgctttcaaaacgggagcgctatttgctttctgtttctcagctccatttatcctgaaaggaaaggatcacaccaagatgaaactcctcggagagaagttcggggtggctttccagatatacgacgatctgaaagacattcttgggtctttcgaaaaggtgggaaaggacctcggaaaagacacagaaaaagtgacgcttgtgaaaaaggtggggattcagaaagctcgtgagatggccgataagtattatgaagaagttttgaaaggtatcgaatcagaaggtctctttcgcacgctgtttcttctgaaagaactcaaacagatggtggaggagagatga

SEQ ID NO: 6344 - protein, 272 aa, Thermotoga sp
MKKEKVEERIREILRPGWDLLTEEAMLYSATVGGKRIRPLLVLTLGEDLGVEEEKLLDVAVAVELFHTASLIHDDLPPIDNADFRRGKPSCHRTYGEDIALLAGDGLFFLAFSQISKIGNSKIFEEFSETAYKLLLGEAMDVEFERRKMEISQEMVERMYAFKTGALFAFCFSAPFILKGKDHTKMKLLGEKFGVAFQIYDDLKDILGSFEKVGKDLGKDTEKVTLVKKVGIQKAREMADKYYEEVLKGIESEGLFRTLFLLKELKQMVEER

SEQ ID NO: 6345 - DNA, 1434 bp, Picrorhiza kurrooa
  CDS (114)..(1229)
acgcgggaaggcaattctatacaagattcacataattctcttctctgcacctgaatcagcaatcacactactatctctgatcttaatccacacttgatatttcctcaccaacaatgagccttgtaaattctattacatggtcacaaacaagctccatactcaacattcaaagcaacatatcaaaaaaactcacacccttctctattctcccacatccactaacaaacaatcttccaatctcccttttcccaaacccaaaatcaaacatatccaattccaacactcccctctcagcaattctcaccaaagaccagaaaccccaaaatcctccaaccacacccacattcgatttcaagtcctacatgctccaaaaagcggattccgtaaacaaagccttagacgactcaatccccctaacagagccgttaaaaatccaagaatcaatgcgatattcccttctcgccggcgggaaaagaatccggccaatgctctgcatcgccgcctgtgaactcgtaggcggcgacgagtccaccgccatgccggcagcgtgcgcagtcgagatggtccacaccatgtccttgatgcacgacgacttgccatgcatggataacgacgatttacgcagggggaaaccgacgaatcacaaggtcttcaccgaagatgttgcggttttggcgggagacgcgatgctggcattttcgttcgaacacgtggcgagtttgacgaaaggggtttgttcagaaaggattgtgagagtgatttatgagcttgccaagtgtgttgggtgtgaagggcttgtcgcagggcaagtggtagatatatgttctgagggaatggatgaggtgggattggagcatttggagtttatacatttgaataaaaccgcggctttattggagggatcggtggttttgggcgcgattttgggtggtgggagtgatgaggaggttgagaagttgaggaatttcgctaggtgtattgggcttttgtttcaggttgtggacgatattcttgatgttaccaagtcgtccaaagaattggggaagacggccgggaaggatttggtggcggataagacgacttatccgaagctgatcgggattgagaaatccaaggagtttgctgagaggttgaatagggaagctaaggagcaccttgctgggtttgatcagaacaaggcggctcctttgattgctctggctgattacattgcgtacagggataattgatttcttgtcatcatttgtatttcgtttggatatttattcatataaacacatcaaatccatggttgcttctcattgaaacagtattgagaaaatcttaatatataggtttgaaaagccagcttgggatattgtatcaaagttcatgaatggcgaaagtttaactttttcttgtaaaaaaaaaaaaaaaaaaaaaaaaaaaaaaaaa

SEQ ID NO: 6346 - protein, 371 aa, Picrorhiza kurrooa
MSLVNSITWSQTSSILNIQSNISKKLTPFSILPHPLTNNLPISLFPNPKSNISNSNTPLSAILTKDQKPQNPPTTPTFDFKSYMLQKADSVNKALDDSIPLTEPLKIQESMRYSLLAGGKRIRPMLCIAACELVGGDESTAMPAACAVEMVHTMSLMHDDLPCMDNDDLRRGKPTNHKVFTEDVAVLAGDAMLAFSFEHVASLTKGVCSERIVRVIYELAKCVGCEGLVAGQVVDICSEGMDEVGLEHLEFIHLNKTAALLEGSVVLGAILGGGSDEEVEKLRNFARCIGLLFQVVDDILDVTKSSKELGKTAGKDLVADKTTYPKLIGIEKSKEFAERLNREAKEHLAGFDQNKAAPLIALADYIAYRDN

SEQ ID NO: 6347 - DNA, 1140 bp, Rhodococcus erythropolis
  CDS (1)..(1140): transl_table=11
ttggaggccaccctgtccgcaggaaccgcgcgcgttggacagagttcgaccaacaccgcaccgcatccgacctcactcgaactgccaggcgtgttcgaaggagcgctccgcgacttcttcgattcacgccgcgaactcgtctcgaacatcggcggtggatacgagaaagccgtcagcaccctcgaagccttcgtcctgcgcggaggaaagcgcgtccggccgtcgttcgcctggacgggatggctcggcgccggaggcgacccgaacgggagcggcgcggacgcggtgattcgtgcatgcgcggccctcgaactggtgcaggcctgcgcgctcgtccacgacgacatcatcgacgcatcaacgaccaggcgcggcttcccgaccgttcacgtcgaattcgaggaccagcaccgaggcgaggagtggagcggcgactccgcgcacttcggcgaggccgtcgccattctcctcggcgacctggccttggcctgggctgacgacatgatccgagaatccgggatcagccccgacgcggccgcacgagtgagcccggtctggtcggcaatgcgcaccgaggtgcttggtggccaattcctcgacatcagcaacgaagcccgcggagacgagaccgtcgaggcagccatgcgggtcaaccgttacaaaaccgccgcgtacacgatcgaacgcccactgcacctcggcgccgcattgttcggtgcagacgccgagttgatcgatgcctaccggacgttcggcaccgacatcgggattgccttccaacttcgcgacgacctgctcggtgtcttcggagatccgtccgtcacgggcaaaccgtcgggcgacgatctcatcgccggtaagcggactgtcctgttcgcgatggcgcttgcccgcgccgacgccgcagatccggcggcagcagaactgctccgcaacggaatcggcacccagttgaccgacaacgaagtcgacactctgcgtcaggtgatcaccgatcttggcgccgtcaccgacgtcgaaacgcagatcgacaccctcgtcgaggcagctgcgaacgccctcgactcgagcacggcaacggcagagtccaaggctcgcctgaccgatatggcgatcgcggccacgaagcgaagctactga

SEQ ID NO: 6348 - protein, 379 aa, Rhodococcus erythropolis
MEATLSAGTARVGQSSTNTAPHPTSLELPGVFEGALRDFFDSRRELVSNIGGGYEKAVSTLEAFVLRGGKRVRPSFAWTGWLGAGGDPNGSGADAVIRACAALELVQACALVHDDIIDASTTRRGFPTVHVEFEDQHRGEEWSGDSAHFGEAVAILLGDLALAWADDMIRESGISPDAAARVSPVWSAMRTEVLGGQFLDISNEARGDETVEAAMRVNRYKTAAYTIERPLHLGAALFGADAELIDAYRTFGTDIGIAFQLRDDLLGVFGDPSVTGKPSGDDLIAGKRTVLFAMALARADAADPAAAELLRNGIGTQLTDNEVDTLRQVITDLGAVTDVETQIDTLVEAAANALDSSTATAESKARLTDMAIAATKRSY

SEQ ID NO: 6349 - DNA, 1657 bp, Ginkgo biloba
  CDS (225)..(1400)
ggcataattcatgtttcctataactagagtccaatacgcttggaattgcattcggcctttgcctttgtgagaggtccaaatcagcaattatcctagaattccatctgtattttatctccggaagagctctatatctttttatctttcaatttatatctcccaaggctgattacgagtttattctgtcttttgatatagttgagagcagaagcataaactaggagatggctgccagtgcaatgacagcaagttaccaaagcctgcacttttgtttgcagtcaaagaatatggcttctccagaatgcattttgaagagtttttcccttccatgtagtcgttttaatggagcttcaacctcgttaggagcttcaaatggtcagtatatgggttttcgtggccatttgagaaaggggttactgtcgtccagaggtgtaatgtcgtctggctctttaaacacagttgctcaattggttagcgaggctgaaacggtcaaggagaagaaggattttgaatttgatttcaaaaaatatatgtattccaaggcgatatcagtgaatgaggcgctagacaaggctgttcctacgcattaccctgagaaaatacacgaatcaatgagatattcgcttctagcaggagggaagcgtgtccggccaacgctctgtattgcagcgtgtgaacttgtaggaggaacggaggatctggccatgccagctgcctgtgcaatggaaatgatccatacaatgacattaatacatgatgatttgccttgcatggacaatgataatttacgtagaggaaagcccacaaatcacaaggcatttggcgaagacactgctgtacttgcaggagatgcactcctttcttttgcatttgaacatattgcaaggtctacaagcaaaactgtggaaagtgagagggttttgagggtgatatgtgaactgggtaaatcgatgggatctgaagggcttgtagctggacagattgttgatattgcaagtgaaggtgatacttcggttgaccttaaaactctggaatatattcatcttcacaaaactgcagtgctattggagtgttcggttgtgtctggagcaatcatcggaggtgcctctgaggaagagattgagagaacaagaaggtatgcccgatgtgtgggtcttttgtttcaggtggttgatgatatactagatgtcacaaaaacatcagaagaattgggtaagactgcagggaaggatctcatcagtgataaagctacttatcccaagctgatgggtcttgagaaagcaaaggaatttgctgttgaattggtcaacaaggccaaggaagaactgtcttactttgatccagtaaaggctgcacctttgttaggtcttgcagattatattgccttcagacaaaactagatccattgaggaagaaaaactagatttgttcttagatatgcgttgtaattttctccgcaattgaccatgtagttgggtctggccgctagcacgatgcattcctcatctggtagggataaactcccccatggaatcatcccctgcacacacattgtagagcctaatactaatgggagactgcatctaggtgtggggaatcatggctcaaaataatatgattcctcttttctgttttcaaaaaaaaaaaaaaaaaaaaa

SEQ ID NO: 6350 - protein, 391 aa, Ginkgo biloba
MAASAMTASYQSLHFCLQSKNMASPECILKSFSLPCSRFNGASTSLGASNGQYMGFRGHLRKGLLSSRGVMSSGSLNTVAQLVSEAETVKEKKDFEFDFKKYMYSKAISVNEALDKAVPTHYPEKIHESMRYSLLAGGKRVRPTLCIAACELVGGTEDLAMPAACAMEMIHTMTLIHDDLPCMDNDNLRRGKPTNHKAFGEDTAVLAGDALLSFAFEHIARSTSKTVESERVLRVICELGKSMGSEGLVAGQIVDIASEGDTSVDLKTLEYIHLHKTAVLLECSVVSGAIIGGASEEEIERTRRYARCVGLLFQVVDDILDVTKTSEELGKTAGKDLISDKATYPKLMGLEKAKEFAVELVNKAKEELSYFDPVKAAPLLGLADYIAFRQN

SEQ ID NO: 6351 - DNA, 1286 bp, Antirrhinum majus
  CDS (10)..(1128)
tcaacaacaatgagcctggtaaatcccattacaacctggtcaacaacaacaacctcaaaatccccaaaaaatgtccaaaccaccaccagatccagatccatcattctccctcacaaaatctcccttttcccatcaaaccccaaatcaaaatcaaaaacccacctcagattctcaatatcatcaatcctgacgaagaacccacaagaatcaagccaaaaaacctccaaagatccaacctttaccctcgatttcaaaacctacatgctagaaaaagccagctctgttaacaaagccttagaacaagctgttttactcaaagagcccttaaaaatccacgaatcgatgaggtactcgcttctagccgggggcaaaagggtcagaccaatgctctgcatcgccgcttgtgagctagttggtgggctggaatccactgcgatgccctcagcttgtgctgttgaaatgatccataccatgtctttgatccacgatgatttgccctgtatggataacgacgatttacgacgtggaaagcccacaaaccacaagatttatggcgaagacgtggcggttttagccggggatgccctgttagcgttctcgttcgagcacgtggcaaaatcgacgaaaggggtgtcgtcggataggattgttagggtgattggtgaattggctaagtgtattggctctgagggtttagttgcaggccaagtggttgatataagttctgaaggaatgactgaagttggattggagcatttggagtttatccacgtgcacaagaccgcggcgttgttggaggcttcggtggttttgggcgcgattgtgggtggtgcggatgatgaggatgttgagaagttgaggaaattcgcgaggtgtatcgggcttttgtttcaagtggttgatgatattttggatgttactaagtcttcgcaagaattggggaagacggcgggtaaagacttggttgcggataagactacgtatccgaagctgcttgggattgagaagtcgagggagtttgcggagaagttgaatagggaggcgcaggagcagctcgaggggttcgattcggttaaggctgcgccgttgatcgcgttggctaactacatcgcttatagagataattgatctgttataaaagaaaggaatgatatgatatactcatagaacctgtgttggttcttacttctcataataatagtgctattgtgaaaatgttgaagatgttgaaaagtgatattgttgtaagttgttgaatgtcatgtataacacaacttcatttgtga

SEQ ID NO: 6352 - protein, 372 aa, Antirrhinum majus
MSLVNPITTWSTTTTSKSPKNVQTTTRSRSIILPHKISLFPSNPKSKSKTHLRFSISSILTKNPQESSQKTSKDPTFTLDFKTYMLEKASSVNKALEQAVLLKEPLKIHESMRYSLLAGGKRVRPMLCIAACELVGGLESTAMPSACAVEMIHTMSLIHDDLPCMDNDDLRRGKPTNHKIYGEDVAVLAGDALLAFSFEHVAKSTKGVSSDRIVRVIGELAKCIGSEGLVAGQVVDISSEGMTEVGLEHLEFIHVHKTAALLEASVVLGAIVGGADDEDVEKLRKFARCIGLLFQVVDDILDVTKSSQELGKTAGKDLVADKTTYPKLLGIEKSREFAEKLNREAQEQLEGFDSVKAAPLIALANYIAYRDN

SEQ ID NO: 6353 - DNA, 1041 bp, Streptomyces argenteolus
  CDS (1)..(1041): transl_table=11
atgacggcgatcgaggtcacggccgaggggcgctcggcgcgcgaggtgctgctctggagccgtgacacggtcgagtcggcactgcgcccggcgatcgacaggctgcccccggcgatgcggcgcatcgccggctaccacttcggctggtcggacgagcgaggcgagcccgcccgggcgggtggcggcaaggcgatccgtcccgcgctggtcctgctggccgccgaggccgtggggggcgccgccgatgcggcgctgcccgcggcggtcgcggtcgagctggcgcacaatttctccctcctgcacgacgacgtgatggacggtgaccggactcgccgccaccgtcccacggcctggacggtcttcggtgtcagcccggcgatcctggcgggggacgccctgctggcgctggccttcgacgtgctcgccacggctgggcacccggccgctccggaggcgacgcggatcttcggtgccgccatccaggaactgctggaggggcagaacgcggacatggccttcgagaggcgtcaggatgtcgagctcgccgagtgcctggtcatggcggcgggcaaaaccggtgccctgctggggtgtgcctgcgcgctcggcgccctgctcggcggcggcgctccggagcaggtcgagcacctgcgcgccttcggcagggacctgggactggcgttccagctcgtcgacgatctcctgggcatctggggagatccgcaggtgaccggtaagccggtctattcggacctgcgcagccgtaagaagtctctgccgatcgtggccgcgctcacctcctcctcccctgcgggacgggagctggccggactgtaccagcgggaacgtcccctgtccgacgccgatctggttcacgccgccgaactcgtcgacgccgtgggcgggcgtgcctggagccagacgcaggccgatgagctactggcgcgcgcactgcaccacctgcggtcggccggttcggtgtctcgccccatcgccgagctgggcacgctcgcccgcctcgtcacccaccgagaccactga

SEQ ID NO: 6354 - protein, 346 aa, Streptomyces argenteolus
MTAIEVTAEGRSAREVLLWSRDTVESALRPAIDRLPPAMRRIAGYHFGWSDERGEPARAGGGKAIRPALVLLAAEAVGGAADAALPAAVAVELAHNFSLLHDDVMDGDRTRRHRPTAWTVFGVSPAILAGDALLALAFDVLATAGHPAAPEATRIFGAAIQELLEGQNADMAFERRQDVELAECLVMAAGKTGALLGCACALGALLGGGAPEQVEHLRAFGRDLGLAFQLVDDLLGIWGDPQVTGKPVYSDLRSRKKSLPIVAALTSSSPAGRELAGLYQRERPLSDADLVHAAELVDAVGGRAWSQTQADELLARALHHLRSAGSVSRPIAELGTLARLVTHRDH

SEQ ID NO: 6355 - DNA, 1612 bp, Paracoccus zeaxanthinifaciens
  CDS (295)..(1158): transl_table=11
ccatggcatccgggtcggatgccgtctatgttggcccgaacaggcagcaggaggccccatgagcgatatccagaccctctcgttcgaggaagccatgcgcgagctggaggcgaccgtcggcaagctggaaaccggcgaggcgacgctcgaggactccatcgcgctctatgaacgcggggcggcgctgcgcgcccattgcgaaacccgcctgcgcgaggccgaggagcgggtcgagaagatcaccctggccgcgaacgggcagccgtccggaaccgagcccgccgagggcctgtgatgcaggcccgcctggccgagatccggcccctggtcgaggccgagctgaacgccgccatcgacgcgctgcccgcgggcgatctgtcggatgcgatgcgctatgccgtgcagggcggcaagcggctgcgcgcgttcctggtgatggagtcggcgcgcctgcacgggctggacgacgacgcatcgctgcccgtcgccgccgcggtcgaggcgctgcacgcctacagcttggtccatgacgacctgcccgcgatggatgacgacgacctgcggcgcggtcagcccaccgtccacgtcaaatggaccgaggcgaccgcgatccttgcgggcgatgcgctgcagacgctggccttccagctgctggccgatccgcgcgtgggcgacgatgcggcgcggatgcggctggtcggttcgctggcgcaggcatcgggggctgcgggcatggtctggggccaggcgctggacatcgcggccgagacctcgggcgtgccgctggatctggacgcgatcatccgcctgcagggtggcaagaccggcgcgctgatccgctttgccgcgaccgccgggccgctgatggcgggggcggaccctgccgcgctggacgattatgcgcaggccgtcgggctggccttccagatcgcggacgacatcctggacgtcgagggctgcgaggccgcgaccggcaagcgcgtcggcaaggatgcggatgccaacaaggcgaccttcgtctcgctgctgggcctcgagggggcgcggtccgaggcgcgtcgcctggccgatgcggggcaggacgcgctggcgggttacggcgatgctgcggggaaccttcgggacctggcgcgcttcgtgatcgaacgcgacagctgatcgccgccttcccgccaaggggcaagatgatgaccgacggacccgcaaccccgatcctggaccgcgtccagcagccatccgacctggcatcgctggacgatgcgcagctgcgcctgctggcggacgagctgcgggccgagaccatcgacatcgtcagccgcacgggcggtcacctgggcgcggggctgggcgtggtcgaactgacggtcgccctgcacgccgtctttcgggcgccgcgcgacaagatcgtctgggacgtggggcatcaatgctatccccacaagatcctgacgggcaggcgggaccggatgcgcacgctgcgcatgggcggcgggctgtcggggttcaccaagcggcaggaaagcgcgttcgatccgttcggtgcggggcacagctcgacctcgatctcggcggcgctgggcttcgcgatggcgcgtgaacttggcggggatcc

SEQ ID NO: 6356 - protein, 287 aa, Paracoccus zeaxanthinifaciens
MQARLAEIRPLVEAELNAAIDALPAGDLSDAMRYAVQGGKRLRAFLVMESARLHGLDDDASLPVAAAVEALHAYSLVHDDLPAMDDDDLRRGQPTVHVKWTEATAILAGDALQTLAFQLLADPRVGDDAARMRLVGSLAQASGAAGMVWGQALDIAAETSGVPLDLDAIIRLQGGKTGALIRFAATAGPLMAGADPAALDDYAQAVGLAFQIADDILDVEGCEAATGKRVGKDADANKATFVSLLGLEGARSEARRLADAGQDALAGYGDAAGNLRDLARFVIERDS

SEQ ID NO: 6357 - DNA, 1116 bp, Arabidopsis thaliana
  CDS (1)..(1116)
atggcttcagtgactctaggttcatggattgttgttcaccaccacaatcatcatcatccatcttcaatccttaccaaatccagatccagatcttgtcctataactcttactaaacccatctcctttcgatcaaaacgcaccgtttcatcatcttcttcaatcgtttcttcttccgttgttacaaaagaagacaatctacgccaatctgaaccatcctctttcgatttcatgtcgtacatcatcaccaaagccgaattagtcaacaaagctttagattcagctgttcctctccgtgagccactcaagatccacgaagcgatgcgttactctcttctcgccggtggcaaaagagttagaccagttctctgcatcgctgcttgtgaactcgtcggaggtgaagaatcaaccgctatgccagcagcttgcgccgtcgagatgattcacaccatgtcgttgatccacgacgatctcccttgtatggataacgacgatctccgccgtggaaaaccgaccaaccacaaagtgtttggtgaagacgtcgctgttttagccggagacgcgcttctctctttcgctttcgagcatttagcttcggcgacgagttctgatgttgtttctccggtgagagtggttcgagccgttggagaattggctaaagcgataggaacagaagggttagtggcgggtcaagtcgtggatattagtagtgaagggttagatttaaacgacgtcggtttagagcatttggagtttatccatttgcataaaacggcggcgttgcttgaagcttctgctgttttgagagctattgttggtggaggaagtgatgatgagattgagaggttaagaaagtttgcgagatgtattggtttgttgtttcaggtggttgatgatatcttgtatgtgacgaaatcgtcgaaagagttagggaaaactgctgggaaagatttgattgctgataagttgacgtatcctaagattatgggtttggagaaatcgagagagtttgctgagaaattgaatagagaggctcgtgatcagcttttagggtttgattctgataaggttgctcctttgttggctttggctaattacattgcctatagacagaactga

SEQ ID NO: 6358 - protein, 371 aa, Arabidopsis thaliana
MASVTLGSWIVVHHHNHHHPSSILTKSRSRSCPITLTKPISFRSKRTVSSSSSIVSSSVVTKEDNLRQSEPSSFDFMSYIITKAELVNKALDSAVPLREPLKIHEAMRYSLLAGGKRVRPVLCIAACELVGGEESTAMPAACAVEMIHTMSLIHDDLPCMDNDDLRRGKPTNHKVFGEDVAVLAGDALLSFAFEHLASATSSDVVSPVRVVRAVGELAKAIGTEGLVAGQVVDISSEGLDLNDVGLEHLEFIHLHKTAALLEASAVLRAIVGGGSDDEIERLRKFARCIGLLFQVVDDILYVTKSSKELGKTAGKDLIADKLTYPKIMGLEKSREFAEKLNREARDQLLGFDSDKVAPLLALANYIAYRQN

SEQ ID NO: 6359 - DNA, 1289 bp, Abies grandis
  CDS (83)..(1234)
gtgcgctgttcaatgcaacgatcaatattagaatcaccagagttgatagcaggaaccattaaaacagaaatagaacaaagatatggcttacagttgtatggcagctagctgccatggcctgcattttatgaatattgcttctcaggaatgtaatttgaaaagaggtattatcccatcaaaacgtctgcatggaatttcatcctcattgtgggcttctaatggcttccaaggccatttggaaagggacttatcggcatatagacatctggtatcatcatccagatgcttaaacacaatcgccatgttgagtaatctgtctgaacaagcaaaggaaaaggccactgaatttgatttcaaggagtacttgcattccaaagcaatatcagtgaatgaggcactggagagggctgtcccacttcgctatcctgaaaaaatacatgaagctatgaggtattctcttctagcaggagggaagcggattcgtcctattctgactattgcagcatgtgagcttgtgggagggagtgaggagctcgccatgccaactgcctgtgcaatggagatgatccacacaatgtctttgattcatgatgatttgccttccatggacaatgatgatttacgccgaggtaagcttacaaaccacaaggtctttggcgaaggcactgctgttcttgcaggggatgcacttctttcatttgcatttgagcacattgcagtgtccacaaggaaaactgtggcgagtcatagggttttgagggtggtatctgaattgggtaaggcaataggctctcaaggggttgctggtgggcaggttgctgatattaccagtgaaggggatccatctgttgggcttgagactctcgaatggattcacattcacaagactgcagtgctcttggagtgcgccgttgtgagtggggcgatcatcggtggcgcttcagagaatgaaattgagagaactggaaggtatgcccgttgcgttgggcttctgtttcaggttgtggatgacatactcgatgtcaccagatcatcagaagaattgggaaagactgcaggaaaggatttggttagtgataaggccacttatcccaagctgatgggtttggagaaagcgaaggaatttgctgatgaattgttggacagagctaaggaggagttatcttgcttcaacccagctaaggctgcacctctgttgggtcttgcagattacattgcattaagacagaactgaaaagcctgcgaaatgtgttcttatgtatgccgtttgtgcttttgcttttgcatct

SEQ ID NO: 6360 - protein, 383 aa, Abies grandis
MAYSCMAASCHGLHFMNIASQECNLKRGIIPSKRLHGISSSLWASNGFQGHLERDLSAYRHLVSSSRCLNTIAMLSNLSEQAKEKATEFDFKEYLHSKAISVNEALERAVPLRYPEKIHEAMRYSLLAGGKRIRPILTIAACELVGGSEELAMPTACAMEMIHTMSLIHDDLPSMDNDDLRRGKLTNHKVFGEGTAVLAGDALLSFAFEHIAVSTRKTVASHRVLRVVSELGKAIGSQGVAGGQVADITSEGDPSVGLETLEWIHIHKTAVLLECAVVSGAIIGGASENEIERTGRYARCVGLLFQVVDDILDVTRSSEELGKTAGKDLVSDKATYPKLMGLEKAKEFADELLDRAKEELSCFNPAKAAPLLGLADYIALRQN

SEQ ID NO: 6361 - DNA, 1311 bp, Cistus creticus
  CDS (116)..(1225)
acctcccctatcggagattttcaatatattttccatttctaaacaatattatcctcttaagaaacattagcatttcagtcacttaccatagtggattctccggtgaccgggaaaaatgagtactgtgaatgtgaatctgggttcatggagtcagcctacctgctttgtatttaaccagaaaactagatccagaatccctaattttagttccttcaagggattcatggcttcttcgtcgaatttccgttctgtttcttcttcttcttcttcctcctcctcctttattgcctcagttctttctgggaaagatactatgaagggagaagaagaaaattccggttttgatttccagtcttatatggatcagatggcggattccgttaatcaagcgctggaatcagcggtttcgctccgggaaccgttgaagatccatgaagcaatgcggtactcgcttttggccggagggaaaagggtgaggccgcttttgtgtattgccgcgtgtgagctcgtcggcggggatgtttccgtggcgatgcccgcggcttgcgccgtggaaatgattcacaccatgtcgttaatccacgatgacctcccatgtatggataacgacgatctccgccgcggaaaaccgacgaatcacaaggcattcggcgaggatatcgccgtattagccggggacgcgctgctgtccttcgcattcgaacacgtggcggtgtccacggtgggggcctcgccggataaaattgtccgggcggtgggggaattagcaaaagcagttgggaaagaagggttagtagccggacaagtagtggatataaccagtgagggactaaacgacgtcggattggatcatttggagtacatccatgtccacaagaccgccgtattactcgaggccgcggtggtgctcggggcgattttgggcggaggaacggatgaggaagtggagaggttgaggaaatttgcgatatgcattggtctattgtttcaagtggtggatgatatcttggatgtgacgaaatcttccgtggaattggggaaaaccgccggaaaagatttagtcgcggataaggtgacgtatccgaagctaatggggctggagaagtcgagggagttcgccgagaagctgagggatgatgcggtggagcagttgcgggtgtttgatcaggtgaaggcggcgccgttgattgctttagcacattacattgcttataggcaaaactagtttcatttgttgttaagaaaactatgaatgaaagaagcataaaagattatagttcaaaaaaaaaaaaaaaaaaaaaaaaaaaaaaa

SEQ ID NO: 6362 - protein, 369 aa, Cistus creticus
MSTVNVNLGSWSQPTCFVFNQKTRSRIPNFSSFKGFMASSSNFRSVSSSSSSSSSFIASVLSGKDTMKGEEENSGFDFQSYMDQMADSVNQALESAVSLREPLKIHEAMRYSLLAGGKRVRPLLCIAACELVGGDVSVAMPAACAVEMIHTMSLIHDDLPCMDNDDLRRGKPTNHKAFGEDIAVLAGDALLSFAFEHVAVSTVGASPDKIVRAVGELAKAVGKEGLVAGQVVDITSEGLNDVGLDHLEYIHVHKTAVLLEAAVVLGAILGGGTDEEVERLRKFAICIGLLFQVVDDILDVTKSSVELGKTAGKDLVADKVTYPKLMGLEKSREFAEKLRDDAVEQLRVFDQVKAAPLIALAHYIAYRQN

SEQ ID NO: 6363 - DNA, 1456 bp, Cistus creticus
  CDS (168)..(1262)
gatacaaatccatttcacctgattaataaaacctaaaatctagattatcttccttaatcccctccattctatcccctcactccgacataagaaaacctcagcaattatcacaactatctttccgccgcccacgattctctaaatccaaacctccggcaagtccgaaaatgactactgttagcatcagttcgtgggttcaaacctactgtgtctttaaccaggcaaccagatccagatccagatccagatccccttctttcaatagattcaatctcccgataattccggtctcaaaaccgttccgcttcttccgcccctctaatcgcctcggtactcaccagagaaggcgaatcgaacaagatcccccaaaatgggccttcgatttaaagtcctacatgattcagaaggcgaattccgtgaatcaagccctagaaaccgccgtttcgctccgggagccgctgaagatccacgaggcgatgaggtactcggttttggccggcgggaagcgagttcggccggtgctgtgcatcgccgcatgcgagctcgtcggcggtgaggaatccatggcgatgcccgcggcttgcgccgtggaaatgattcacaccatgtcgctcatccacgacgaccctccctgtatggataacgacgatctccgccgcggaaaaccaacaaaccacaaggtattcggcgaggatatcgcggtgttagccggggacgcgcttctcgctttctcattcgagcacatgacggggtccacagttggcgtatcccccgcccgaattgtgcgggcggttggggaattagcgaaatcgattggttcggaaggattggtagctggccaagttgtggatatctgcagtgagggccttacagatgtaggcttggaacatttagagttcatccatgtgcataaaacggcggccttactcgaaggctcggtggttctgggagcaattcttgggggcggatcggatgaggaagtggagaaattgaggaaatttgcgaggtgcattggattattgtttcaggtagtggatgatattctggatgtgacgaaatcttcaacagaattggggaaaacggctgggaaagatctggtggcggataaggtgacatatccgaagctaatggggatcgagaaatcgagggagtttgcggaggagctgaagaatgatgcggtggagcagttgagagggtttgatcaggagaaggcggcgcctttgattgctttggctaattacattgcttataggcagaattagttgtacaacttggtggattggatcattgaaagtggaatttaatttagcggattcgtgttgtagtagatgattattaagttctatagcgactgcaatgagacagatgtattgctttcttgattgaaagcaatgaatattaatgtgggaatgataagaaattccctttttgatgaaaaaaaaaaaaaaaaaaaaaa

SEQ ID NO: 6364 - protein, 364 aa, Cistus creticus
MTTVSISSWVQTYCVFNQATRSRSRSRSPSFNRFNLPIIPVSKPFRFFRPSNRLGTHQRRRIEQDPPKWAFDLKSYMIQKANSVNQALETAVSLREPLKIHEAMRYSVLAGGKRVRPVLCIAACELVGGEESMAMPAACAVEMIHTMSLIHDDPPCMDNDDLRRGKPTNHKVFGEDIAVLAGDALLAFSFEHMTGSTVGVSPARIVRAVGELAKSIGSEGLVAGQVVDICSEGLTDVGLEHLEFIHVHKTAALLEGSVVLGAILGGGSDEEVEKLRKFARCIGLLFQVVDDILDVTKSSTELGKTAGKDLVADKVTYPKLMGIEKSREFAEELKNDAVEQLRGFDQEKAAPLIALANYIAYRQN

SEQ ID NO: 6365 - DNA, 1548 bp, Abies grandis
  CDS (58)..(1209)
tctgcttctgttggagttgatagcaggaaaaaatcaaagtagaaatagaacaaagatatggcttatagcggtatggcgactagctaccatggcctgcattttatgaatattgctactcaagaatgtaatttgaagagactttctatcccatcgagacgttttcatggagtttcaccatcattgtgggcttctaatggcttccaaggccatttaaagagggagttatccgcaaattcatttctggtatcatcatctagatactcaaacacaattgctaagtttactaatctgcctgaaaaagtaaaggagaaggtcattgaatttgacttcaaggagtatctacgttccaaggcaatggcagtgaatgaggcactggatagggctgtaccacttcgttatcctgaaagaatacatgaagctatgaggtattctcttctagcaggagggaagagggttcgtcctgttctgtgcatttcagcatgtgagcttgtgggagggaccgaggaagtcgccatgccaactgcctgtgcaatggagatgatccacacaatgtctttaattcatgatgacttgccttgcatggacaatgatgattttcgcagaggtaagcctacaaaccacaaggtcttcggggaaggcactgctattcttgcaggggatgcactgctttcatttgcatttgaacacattgcagtatccacaagcaaatctgtggggactgataggattttgagggtggtatctgaattgggtagaacaataggctcccaagggcttgtgggtgggcaggttgctgatattacgagtgagggcgatgcttctgttgaccttgacactctggaatggattcacattcataagactgcagtgctattggagtgctcagttatgtgtggggcgatcattagtggtgcttcagacaatgagattgagagaattcaaagatatgcccgtagcgtggggcttctgtttcaggttgttgacgacatactcgacgtcacgaaatcatcaaaagagttgggcaaaactgcaggaaaggatttgatcagtgataaggccacttatccgaagctgatgggtttagagaaagcaaaacaatttgcttcggatttgttgatcagagctaaggaggatttatcttgcttcgacccaatgaaggctgcaccattgttgggtcttgcagattacattgcattcagacaaaactgaagagcctctaaaagtgttcttatgtatgcgttctgtgctttgtttttacatctactacaacctagaaaataacatatgtaacatcatgtctctttgagttgtgatgatggataatagaatggttccaataggaagtaatgcctggatctaggtccaaggaaccagtcccatgttcttatgtaggagttcctttaacctttagaccaatttatctttgatgttattcttgttgccagagaaaagagttctcacagctaagcttagcctggagaatatcggctggttgcttgattcaagtaaatatagtttaacctatgttaaatgaaaaaaaaaaaaaaa

SEQ ID NO: 6366 - protein, 383 aa, Abies grandis
MAYSGMATSYHGLHFMNIATQECNLKRLSIPSRRFHGVSPSLWASNGFQGHLKRELSANSFLVSSSRYSNTIAKFTNLPEKVKEKVIEFDFKEYLRSKAMAVNEALDRAVPLRYPERIHEAMRYSLLAGGKRVRPVLCISACELVGGTEEVAMPTACAMEMIHTMSLIHDDLPCMDNDDFRRGKPTNHKVFGEGTAILAGDALLSFAFEHIAVSTSKSVGTDRILRVVSELGRTIGSQGLVGGQVADITSEGDASVDLDTLEWIHIHKTAVLLECSVMCGAIISGASDNEIERIQRYARSVGLLFQVVDDILDVTKSSKELGKTAGKDLISDKATYPKLMGLEKAKQFASDLLIRAKEDLSCFDPMKAAPLLGLADYIAFRQN

SEQ ID NO: 6367 - DNA, 1482 bp, Gentiana lutea
  CDS (88)..(1191)
ttcacctttctttcctcctcgtaatcaaacaaatcttcctttcttgcttcacgaaattcgtattcttgaaaacatcagatctatgacatggtggattcatgggtggttcaaagccactctgtatttcatacccctatatccctttttagatcttttcttggatttctgtgcaaacccatgaattacaacaaaattggatcgaatttgatagagaaaaagaagctcatttcatcgttttcagtagcatctttgattactaaagaagaagaagccatgggaggtccaaaagcttccaattatttcgattttaaggcctatttgattgaaaaagctaataaagtaaatgaagctttggatcaagcggtttctgtgaagaacccaccgatgattcatgaagcaatgcgctattccttgttagccggcggcaaaagagttcgtccaatactttgtatcgcagcgtgtgagctcgtcggaggtgaagaatcaaattctgttccggcagcttgtgcggtggagatgatacacaccatgtcgttaattcacgacgatttgccgtgttatggacaacgagatctccgacgaggaaaagcccacgaaaccacaaagtcttcgtgcgaggacgtagcggtcctcgccggcgattcccttctagcattctcattcgaatacatcgccaccgccactaaaaacgtctctccggcgaagaattttagccgcagtaggcgaattagcaaatcaattgggacagaaggcttagtagctggccaagtagctgattttgtcattaatggggaaaaccagatgtttggattagaccaattggagttcatccacatccacaaaacggcagctttactggaagcagcggtggtgctcggcgcaatcctgggcggcggaaacccagaagaggttgagaaattgagacgttttgctaggtgtattgggctattgtttcaagtggttgatgacattcttgatgtaacgaaatcatctgaagaattggggaaaactgcagggaaaagatcttgtggcggaaaaactacttatccgaaattaatgggtttagatggagctagagagtttgctgataaattgaacaaagatgcgaaaaatcagttgtcggaatttgatcgtgaaaaggccgctcctttgcttgctttggcggattatattgcgtataggcagaattagggggattttgattgaagaacgacccggatttggaagtcgggttcgggtttttgttgtttgttgtaacctttggtggtgttgtattagatttattttagtattaaaaaagggttaacaacggtatggaatgtaaggaatctaccttcaaaaaaaaatgtactgaatcattgaaatgattcagtcattttcttgtgtttagattgatttcggtttggaatatgctactatcataaatcttgtgtcaaaataagtaatatatattgatgatttttgaaaaaaaaaaaaaaaaaa

SEQ ID NO: 6368 - protein, 367 aa, Gentiana lutea
MVDSWVVQSHSVFHTPISLFRSFLGFLCKPMNYNKIGSNLIEKKKLISSFSVASLITKEEEAMGGPKASNYFDFKAYLIEKANKVNEALDQAVSVKNPPMIHEAMRYSLLAGGKRVRPILCIAACELVGGEESNSVPAACAVEMIHTMSLIHDDLPCYGQRDLRRGKAHETTKSSCEDVAVLAGDSLLAFSFEYIATATKNVSPAKNFSRSRRISKSIGTEGLVAGQVADFVINGENQMFGLDQLEFIHIHKTAALLEAAVVLGAILGGGNPEEVEKLRRFARCIGLLFQVVDDILDVTKSSEELGKTAGKRSCGGKTTYPKLMGLDGAREFADKLNKDAKNQLSEFDREKAAPLLALADYIAYRQN

SEQ ID NO: 6369 - DNA, 1140 bp, Streptomyces avermitilis
  CDS (1)..(1140): transl_table=11
gtgggccgacttctcgaccgcttcctggcggagcgcgtggcgcgggcggcggccctcgacccggtgttcgcccacgacatcgccgagcgcgtggcgcggttcaccctggacggcggcaagcgcacccggtcccagttcgtgtggtgggcgcaccgggcgtgcggcggaccggccgccggggcggaggcggccctgcgggtcggtgccgccctcgaactcatccagacgtgcgcgctggtgcacgacgacgtgatggacggctcccggctgcgccgcggccggcccgcgctgcacacggacgtgagtgcccagtacgccgacgccgtcctgcccgccccgggcacacgcttcggtgaggcggccgcgatcctcgccggagacctggctctcgcctgggcggacgacgtggtggcggacaccgacctggcaccggacccggggcgcagggtgcgcgaggtgtggagctgcctgcggatggaaatggtggccgggcagtacctggacatccagggccaggcgacctcgtcgcattccgaggcccgcgcgatgcgcgccgcctgcctcaagagcgcgctgtactccgtgcagcggccgctcgaactcggtgccgccctcgccggggcggacaccgccacgactcaggcgttgtgctcggcgggccggtgcgtcggcttggccttccagctccgcgacgacctccacgacgtcttcgaggaaccccggcgcaccggcaagccgtcgggcggtgacatccgggcgggcaaacccacctacctcgtcgccgtggcgcgggcccgggccgaagcggccggcgaccgcggcgccctcgccgtactgcggcgctcgctcggttgcgccgatctgtccgacgcggacctcgcccgggtgcgggacgtcctggtcaccaccggcgcgcgtgacacggtcgaggccgagatcgaccggctggtggcccagggcctgcgccacatgggcgccgcctcactcgcccccgagggacgacgccatctggacgcactgctccgttcagcggccggtgcgccctcggtccgccggcaggcccctgacgcgtcccgctccgagaacgggatgcccgtatcgctgctgctcaccgccacggccgagggggcctcccgatga

SEQ ID NO: 6370 - protein, 379 aa, Streptomyces avermitilis
MGRLLDRFLAERVARAAALDPVFAHDIAERVARFTLDGGKRTRSQFVWWAHRACGGPAAGAEAALRVGAALELIQTCALVHDDVMDGSRLRRGRPALHTDVSAQYADAVLPAPGTRFGEAAAILAGDLALAWADDVVADTDLAPDPGRRVREVWSCLRMEMVAGQYLDIQGQATSSHSEARAMRAACLKSALYSVQRPLELGAALAGADTATTQALCSAGRCVGLAFQLRDDLHDVFEEPRRTGKPSGGDIRAGKPTYLVAVARARAEAAGDRGALAVLRRSLGCADLSDADLARVRDVLVTTGARDTVEAEIDRLVAQGLRHMGAASLAPEGRRHLDALLRSAAGAPSVRRQAPDASRSENGMPVSLLLTATAEGASR

SEQ ID NO: 6371 - DNA, 1128 bp, Eucommia ulmoides
  CDS (125)..(991)
tcttcttcttcttcttcttcttcttcttctttctcaatctctgcaattcttacccagaaacaaacgggttgctccccatgaagaaaccccatttcgttcgccggcgttcgatttcaaggcctacatgctcggaaaagccgattccgtcaacaaggcgttggaggctaccgttttgctccggtatccaattaagatccacgagtctatgcggtactccatacttgccggcggaaagcgcgtccgtccactcctatgcatcgctgcctgtgagctcgtcggtggccaagagtccaccgccatgcctgcggcctgcgcagtggagatgatccacaccatgtccctaatgcacgacgacctcccctgtatggacaacgacgaccttcgccgcggcaaacccacgaaccacatggtatttggcgaggacgtcgccgtcttggccggcgactcgctcctcgccttcgcgttcgagctcatcgccacttccaccacgggcgttccggccgacagaatagtccgcgtcatcggcgaactggcgaaatcaatcggttccgaaggcttagttgccggccaggtgatcgacatatgctccgaaggaatgaccgacgtgggtctcgagcaccttgagttcatacacgtccacaagacggcggcgctgcttgaaggctcggtggttctcggggcaattctgggcggcgccaccgacccagaagtcgaaaagctccgaaaattcgcgaggtgtatcggtttcttgtttcaggttgtggacgacattctcgacgtgacgaaatcttcccaagaactggggaagacggccggaaaggatcttgtcgccgacaagaccacttatccgaagctgattgggcttgagaaatcaagggaatttgcagagaaattgaacagggaggctcaagatcagcttgccgcatttgacatagaaaaggccgctcctttgattgctttagcaaattacattgcttacaggaacaattgacgattgataattgatatgtttgcatgtctggttttcgggatctttgatagttacacataaatcacaattgatgattaattgttgggtccaataaataagggattcaagaaagacttgcaattgctgcaattttcatc

SEQ ID NO: 6372 - protein, 288 aa, Eucommia ulmoides
MLGKADSVNKALEATVLLRYPIKIHESMRYSILAGGKRVRPLLCIAACELVGGQESTAMPAACAVEMIHTMSLMHDDLPCMDNDDLRRGKPTNHMVFGEDVAVLAGDSLLAFAFELIATSTTGVPADRIVRVIGELAKSIGSEGLVAGQVIDICSEGMTDVGLEHLEFIHVHKTAALLEGSVVLGAILGGATDPEVEKLRKFARCIGFLFQVVDDILDVTKSSQELGKTAGKDLVADKTTYPKLIGLEKSREFAEKLNREAQDQLAAFDIEKAAPLIALANYIAYRNN

SEQ ID NO: 6373 - DNA, 1278 bp, Streptomyces griseus
  CDS (1)..(1278): transl_table=11
atgggccgtcgccagcctgaggaaccctcgttcggcgagtccgcgcggccggctcccgggacgggcgggcaccgccaccacgccgccccctcgtccgaggacgcccgggtcgtggacgcggacgtggtcgacgccgtcctgcgcaccgcgcgggcggtgctggcggagcgggtggacgaggcgatggcgagcgacgctctgttctgcgacgagctggcacggcgggtcgccgatttcacgctcgacggcggcaagcgggtacggccgcgcctgctgtggtgggggatgcgctcctgcggtgcggcggataccacggcggcgctgcggctcggggtggcgctggagctgatccagagctgtgcgctgatccatgacgatgtgatggaccgctcgcggctccgccgggggaagcccgccgtgcacatcggtctggcggaacgtgcgggttactcgccggattccgggcggggttccgccttcggcgcctcggccgccgtgctggcgggtgacctcgcgctggcctgggccgacgacacggtggcggagaccgcgctgtccgccgtccagcgtcgtcggatcggccccctgtggcggaccatgcggaccgagatggtcgccggacagtacctggatctgcgcggccaggtccgtggcgggtcatccgtggagcaggccctgcggaccgcgtgcctcaagagcgcctcgtactccgtcgagcggcctctggcgctcggtgccgccctggcgggcgccgatgaagcgaccaccgacgccctgcgctccgccggccggtgcgccggcatcgcctttcagctgcgggacgacctgctcggggtcttcggcgacccggagctgaccgggaaaccgtccggcgacgacatccgcgagggcaagtcgacctacctgctccccgtcgcccggaggtgggcggaaccggcgggcaacaaacaatctctggcggtgctcggccgcttcccgggcggcggcaacctcgccaaggaggatctcccggaggtacgcggcgtgctcgaggagacgggggcacgcgcccacgtggagcgcaaggcggaccccctccgcgaccacgcgttgggccgtttggcacaggccgttgaagtggaagcgcacggcggccgccagttgctcggactgctccgcacggtttccggagagcggaccgggcaatcccccgcaaccggcgggacgcacggtcacggccccggggcggcagccgccgccccggccctgaccacggcggaaggaggtaccaccaggtga

SEQ ID NO: 6374 - protein, 425 aa, Streptomyces griseus
MGRRQPEEPSFGESARPAPGTGGHRHHAAPSSEDARVVDADVVDAVLRTARAVLAERVDEAMASDALFCDELARRVADFTLDGGKRVRPRLLWWGMRSCGAADTTAALRLGVALELIQSCALIHDDVMDRSRLRRGKPAVHIGLAERAGYSPDSGRGSAFGASAAVLAGDLALAWADDTVAETALSAVQRRRIGPLWRTMRTEMVAGQYLDLRGQVRGGSSVEQALRTACLKSASYSVERPLALGAALAGADEATTDALRSAGRCAGIAFQLRDDLLGVFGDPELTGKPSGDDIREGKSTYLLPVARRWAEPAGNKQSLAVLGRFPGGGNLAKEDLPEVRGVLEETGARAHVERKADPLRDHALGRLAQAVEVEAHGGRQLLGLLRTVSGERTGQSPATGGTHGHGPGAAAAAPALTTAEGGTTR

SEQ ID NO: 6375 - DNA, 966 bp, Citrus sinensis
  CDS (1)..(966)
atggttattgctgaggttcctaagcttgcctcagctgctgagtatttctttaaaatgggggtggaaggaaagaggttccgtcccacggttttattgctgatggcaacagctctgaatgtgcgagtacctgaacctctacatgatggagtagaagatgcttcggcgactgaactacgtacaaggcaacaatgtatagctgagattacggagatgatccatgtagcaagccttcttcatgatgatgtcttggatgatgcagataccaggcgtggtattggttcattgaattttgtaatgggcaataagttagctgtattagcgggtgattttcttctttcccgtgcttgtgttgcccttgcctctttgaaaaacacagaggttgtgacgttactggcaaccgttgtagagcatcttgttactggtgaaaccatgcaaatgacaacatcatctgaccaacgttgtagcatggattattatatgcaaaaaacatactacaagaccgcatcattaatctcaaacagctgcaaggcaattgcccttcttgctggacaaacagccgaagtggcaatattagcttttgattatggaaagaatctgggtctggcatatcaattaatcgacgatgttctcgatttcactggcacatcagcctctcttggaaagggttctttatctgacatccggcatggaatcataacagctccaatattgtttgccatggaagagttccctcagttacgcacagtagttgagcaaggcttcgaggattcctcaaatgttgatattgcccttgagtaccttgggaagagtcgagggatacaaaagacaagagaactggccgtgaagcatgctaatcttgctgcagctgcgattgattctctacctgaaaacaatgatgaggatgttacaaagtcaaggcgtgcacttttagatctcactcatagagtcatcacaagaaataaataa

SEQ ID NO: 6376 - protein, 321 aa, Citrus sinensis
MVIAEVPKLASAAEYFFKMGVEGKRFRPTVLLLMATALNVRVPEPLHDGVEDASATELRTRQQCIAEITEMIHVASLLHDDVLDDADTRRGIGSLNFVMGNKLAVLAGDFLLSRACVALASLKNTEVVTLLATVVEHLVTGETMQMTTSSDQRCSMDYYMQKTYYKTASLISNSCKAIALLAGQTAEVAILAFDYGKNLGLAYQLIDDVLDFTGTSASLGKGSLSDIRHGIITAPILFAMEEFPQLRTVVEQGFEDSSNVDIALEYLGKSRGIQKTRELAVKHANLAAAAIDSLPENNDEDVTKSRRALLDLTHRVITRNK

SEQ ID NO: 6377 - DNA, 1176 bp, Tagetes erecta
  CDS (50)..(1135)
ggcacgaggtttctctaaacctcaatttctgcaataaaattcatacaaaatgagtcttgtaaatcccacatctttgttctatggatcccccattatgaccagatccccaatcttcctcaacccgacccgaaaatcccaacccgtttcatctttctccgcatccaatttcccccaaatctctgcaattttgacaaaagaacatcaatcaaacgcaccagaagacaaaatcaaagaaacccaatccaaattcgagttcgatttcaaatcatacatgttggagaaagcgaatttggtgaatcaagcactagatttagcggttccgttgaaagacccgataaagatccatgaatcgatgcggtactcgcttctcgccggaggaaaacgagtccggccggtgttatgtatcgccgcttgtgaactcgtcggaggagacggtttaaccgccatgccggcggcctgtgcggtggagatgattcacaccatgtcgttaatgcacgacgatcttccatgcatggataacgacgactttcgccgtgggaaacccacaaaccatatggtgtacggcgaagaaatcgccgtacttggcggtgacgctatgctctcatttgcttttgagcatatggccaccgctacaaaaggagtatcctcggacaggatactccgtgcaattggcgaactcgctaaatgcatcggctccgaggggcttgtcgccggtcaggtggtggacatatgctccgaaggagccgatgtcggattagagcatttggaatttatacatttacacaaaaccgcggcgttgcttgagggttccgtggtgcttggtgccatcttgggcggtgggtcggacggagaaattgagaaactgcggaaatttgcgaggtcgatcggacttttatttcaggtggtggatgatattcttgatgtgacgaaatcgtctgaggaattggggaaaaccgctggaaaagatttggtgtcggataagacgacgtatccgaaactgttggggattgagaaatcgcgagaatttgcggaggaattgaacaaggatgcacaagaacagttatcggagtttgatccccggaaagccgcaccgttaattgcacttgctaattacattgcttataggcaaaattgatcatacaatgtatgttatgttatggtatcgatcttttatta

SEQ ID NO: 6378 - protein, 361 aa, Tagetes erecta
MSLVNPTSLFYGSPIMTRSPIFLNPTRKSQPVSSFSASNFPQISAILTKEHQSNAPEDKIKETQSKFEFDFKSYMLEKANLVNQALDLAVPLKDPIKIHESMRYSLLAGGKRVRPVLCIAACELVGGDGLTAMPAACAVEMIHTMSLMHDDLPCMDNDDFRRGKPTNHMVYGEEIAVLGGDAMLSFAFEHMATATKGVSSDRILRAIGELAKCIGSEGLVAGQVVDICSEGADVGLEHLEFIHLHKTAALLEGSVVLGAILGGGSDGEIEKLRKFARSIGLLFQVVDDILDVTKSSEELGKTAGKDLVSDKTTYPKLLGIEKSREFAEELNKDAQEQLSEFDPRKAAPLIALANYIAYRQN

SEQ ID NO: 6379 - DNA, 1441 bp, Rhodobacter capsulatus
  CDS (213)..(1079): transl_table=11
ttcggcatacgtcgagcagcgatgccgcgctgacagtgtcacgcagctgaacgcggcgagtgcgctgatcagtcggtccggctctccgaacgcggcgcgaagctgaaagagcgctgcgcgatgctgctcaaggaagccgaggaacgggtcgaaaagatcctgctgggcgaaggcggggtgcccgcgggcaccgttgcggtggaaggactctgatgttttccgaacgtttgaaagaagtgcaggacggcgtcgaagcggcgatggcggcggcgatcgggcgtctgcccgcgggtgatctgcgcgatgcgatggcctatgcggcacagggcggcaagcggctgcgggccttccttgccatcgaatccgccgcgatccacgggatttcgatggaacaggcgatgcccgcggcgctggcggtcgaggcgctgcatgcctacagcctcgtccatgacgacatgccctgcatggacaatgacgatctgcgccgcggcctgccgaccgtgcaccgcaaatgggacgaggccaccgccgttctggcgggcgacgcgctgcagaccctcgcctttgagctttgcaccgatccggtgctgggatcggccgaaaaccgggtcgcgctggtcgccgctctggcgcaggcctcgggggccgaggggatggtctacggtcaggcccttgatattgctgccgaaaccgccgcggtgccgctgacgcttgacgaaatcatccggctgcaggcgggcaagaccggcgcgctgatttcctttgccgcgcaggccggcgcgatcatcgcgggcgccgaccgcgcactgctggccgcctatgccacggcgcttggcctggccttccagatcgccgacgacattctggatgtcgaaggcgacgaggaagcggcgggcaagcgtctgggcaaggatgccgaggcgcacaaggccactttcgtctcgctgctgggtctgccgggggcaaaagcccgcgccgccgatctggtcgccgaggccgaagccgcccttgcgccctatggcgaggccgccgctacccttcgcgcctgcgcgcgctatgtgatcgaacgcgacaagtgaagcgagccccatgagccagcccccagtgaccccgatcctcgaccgcgtgcgtctgccctccgacatgaaagggctgagcgaccgcgacctgcaccgactggccgatgaactgcgcgccgagacgatctcggccgtgtcggtgacgggcggccatctgggcgcggggctgggcgtggtcgaactcaccgtggcgctgcatgcggtcttcgactgcccgcgcgacaagatcgtctgggacgtggggcaccaatgctacccgacaagatcctgaccggtcggcgcgaccgcatccgacgctgcgcataggggcggctctcggcttaccaacgctccaaagccctatgacgccttcggggccggca

SEQ ID NO: 6380 - protein, 288 aa, Rhodobacter capsulatus
MFSERLKEVQDGVEAAMAAAIGRLPAGDLRDAMAYAAQGGKRLRAFLAIESAAIHGISMEQAMPAALAVEALHAYSLVHDDMPCMDNDDLRRGLPTVHRKWDEATAVLAGDALQTLAFELCTDPVLGSAENRVALVAALAQASGAEGMVYGQALDIAAETAAVPLTLDEIIRLQAGKTGALISFAAQAGAIIAGADRALLAAYATALGLAFQIADDILDVEGDEEAAGKRLGKDAEAHKATFVSLLGLPGAKARAADLVAEAEAALAPYGEAAATLRACARYVIERDK

SEQ ID NO: 6381 - DNA, 921 bp, Arabidopsis thaliana
  CDS (1)..(921)
atggctactactgttcatctcagctcattctccctcttcatccaatccagaggaagaagagacaactccatatcttccgtcaagagtctcaaaaaacgcacagaacccctcacggtccaggaagccgtgcggtactcattgctagcgggcggaaaacgtgtgaggcctctgctctgcattgctgtctgcgagcttgtgggaggcgacgaggctactgccatgtcagctgcttgcgcggtcgagatgatccacacaagctctctcattcatgacgatcttccgtgcatggacaatgccgacctccgtagaggcaagcccaccaatcacaaggtatttggagaagacatggcggttttggccggtgatgcgcttcttgctttggcgtttgagcacatgacggttgtgtcgagtgggttggtcgcttccgagaggatgatccgggcagtggttgagctggcaagggccatagggacaaaagggttagtggcagggcaagtggttgacctaagcagcgaaagattgaatccacacgacgttggattggagcgtctagagttcatccacctccacaaaacggcggcgttgttggaggcagcagcggttataggtgccataatgggaggtggaacagaggaagagatcgaaaagcttagaaagtatgctaggtgtattggactattgtttcaggttgttgatgatattcttgacgtaacaaaatctacagaggaattgggaaagactgcaggaaaagacgtaatggctggaaagctgacgtatccaaggctgataggtttggagagatccagggaagttgcggagaaactgagcagagaagccgaggagcagcttctagggtttgagtctgacaaggcggcgcctctggtagctcttgctagctacatttcttgcagaaacgactga

SEQ ID NO: 6382 - protein, 306 aa, Arabidopsis thaliana
MATTVHLSSFSLFIQSRGRRDNSISSVKSLKKRTEPLTVQEAVRYSLLAGGKRVRPLLCIAVCELVGGDEATAMSAACAVEMIHTSSLIHDDLPCMDNADLRRGKPTNHKVFGEDMAVLAGDALLALAFEHMTVVSSGLVASERMIRAVVELARAIGTKGLVAGQVVDLSSERLNPHDVGLERLEFIHLHKTAALLEAAAVIGAIMGGGTEEEIEKLRKYARCIGLLFQVVDDILDVTKSTEELGKTAGKDVMAGKLTYPRLIGLERSREVAEKLSREAEEQLLGFESDKAAPLVALASYISCRND

SEQ ID NO: 6383 - DNA, 1161 bp, Streptomyces coelicolor A3
  CDS (1)..(1161): transl_table=11
atgacggagacccggcgcggcgccaccgcgacgtgccgtcccaccggggcgccggaaaggcacgggcccatcggcacacagcgcgagaaggagccgggggagccgtccgacgggcagggggaggcggtggtcgaagggcacgaggcggccctgctcctgagcgagtcacgagcgtcggtcgatcccgaactgcggtccgccatcgcgacgctgccggagtcgatgcgccgggtcgcgctctaccacttcggctggcagcacgcggacggcacgcccgcggcgggcaacgcgggcaaggcgatccgccccgcgctcgtcctcaccgcggcggccgcgctcggcggcccgggggcccgcgcggcggccgtccgtgccgcggcggcggtggagctggtccacaacttcaccctgctgcacgacgacgtgatggaccgcgacgccacccggcggcaccggccgaccgcgtggaccgtgttcggcgacgccgacgcgatcctggccggggacgcacttcaggcgctcgccctgcggctgttcgccgccgacccgcatccggcgtccgcggcggcggccacccggctcgccgactgcgtcatggagctgtgcgagggccagcacgcggacacggcgatggagcggcccccgccggacgaggtgaccctcgacgagacgctcgtcatggccgaggccaagacgggtgccctgctgggctgcgcctgtgccgtcggcgcgctgtacgcgggcgccgccacggaggacgtcgaggccctggacgccttcggccgtgagccgggaatggccttccagctcatcgacgacgtcatcggcatatggggcgacccggcgccacaccggcaagccggccggtgcgacctggccgcccgcaagaagtcactgccggtggtcgccgccctcacctccggcaccccggccgccgccgaactggccgagctgtacacaggcccgtacgacgagaacaaggaggacctggagcgcaccgccctggccgtggagcgggccggcggccgggactgggcacaggcccaggcggccgaccggatggcgagggccatgcaggagctggcgcgtgccgtgcccgagccggaggcggcgggcggcctgctcgccctggccgagttcgtgacgcggcgcagcacctga

SEQ ID NO: 6384 - protein, 386 aa, Streptomyces coelicolor A3
MTETRRGATATCRPTGAPERHGPIGTQREKEPGEPSDGQGEAVVEGHEAALLLSESRASVDPELRSAIATLPESMRRVALYHFGWQHADGTPAAGNAGKAIRPALVLTAAAALGGPGARAAAVRAAAAVELVHNFTLLHDDVMDRDATRRHRPTAWTVFGDADAILAGDALQALALRLFAADPHPASAAAATRLADCVMELCEGQHADTAMERPPPDEVTLDETLVMAEAKTGALLGCACAVGALYAGAATEDVEALDAFGREPGMAFQLIDDVIGIWGDPAPHRQAGRCDLAARKKSLPVVAALTSGTPAAAELAELYTGPYDENKEDLERTALAVERAGGRDWAQAQAADRMARAMQELARAVPEPEAAGGLLALAEFVTRRST

SEQ ID NO: 6385 - DNA, 897 bp, Zymomonas mobilis
  CDS (1)..(897): transl_table=11
atggcagttaatcttaagaccatgatggaacaggtcgctcaggatattgaccggctttttgctgaacaattaccggttccagaagacccccgtcgccgcttggtagaggccatgcgctatgccgcaatcggtggcggaaaaagactgcgtcctcttctggttgtcgccacctgcgccttgttcaatgtcgatcgcgaagccgctttacgggtcggcatggctatcgaatgtatccatgtctattctttgattcatgatgacatgccctgcatggataatgatgatttgcggcgtggcaaacccactgttcataaagcctttgatgatgcttctgcggttctttccggtgacgcgcttcaggctttggcttttgaaattctttcagaagaaaaaatccataccgatccccatgttcggctagaattgattcaggctttgctatcgcctccggtaaaagacggtatggtcggtggacaggccatcgatttggccgcagaaacctcgacggtgccttttgatcttccgaccatcacccgcttgcaacagcttaaaaccggcgccttattcggtttttgtttagaagccggtgctatcatgggtcgtcagaataaagacatccgtgatcgtctgaaggcctatgcccgtgatatcggtcttgctttccagattgctgatgatctgatcgatgccgaaggtgacgaagccgttgccggaaaagcagttggtaaagatgctgccgccggaaaagcgaccttcctgtctctgttaggtctcgaaaaagcccgttcacaggcacaggcattagtcgaccaggcgattgctcatctgtctgttttcggatcagaagccgattatttacggagtattgctcgctatatcgtagcgcgcgatcactaa

SEQ ID NO: 6386 - protein, 298 aa, Zymomonas mobilis
MAVNLKTMMEQVAQDIDRLFAEQLPVPEDPRRRLVEAMRYAAIGGGKRLRPLLVVATCALFNVDREAALRVGMAIECIHVYSLIHDDMPCMDNDDLRRGKPTVHKAFDDASAVLSGDALQALAFEILSEEKIHTDPHVRLELIQALLSPPVKDGMVGGQAIDLAAETSTVPFDLPTITRLQQLKTGALFGFCLEAGAIMGRQNKDIRDRLKAYARDIGLAFQIADDLIDAEGDEAVAGKAVGKDAAAGKATFLSLLGLEKARSQAQALVDQAIAHLSVFGSEADYLRSIARYIVARDH

SEQ ID NO: 6387 - DNA, 957 bp, Synechococcus elongatus
  CDS (34)..(957): transl_table=11
cctatatgccgcccgcaccctgaggagttgttcatgatttccgctgatcccccccaagtccatcccgccggcacatttgatgtcaaggcctacctcaaagaacgccaagcccttgtggaagctgcccttgaagcctcgattccggtggcctatccggagaaaatttacgatgcgatgcgctattcactgatggcggggggcaagcggctgcgcccgattctctgtttggccacctgtgaactgatggggggcaccgtggaaatggccatgccgactgcctgtgccttggagatgatccatacgatgtcgctcatccacgatgatctaccggccatggacaatgacgactaccgtcgcggcaagcccaccaatcacaaggtctatggtgaagatattgccattctggcgggggatggcttactggcctatgcctttgagtatgtggtggaacaaaccaagaatgtacccgcggagtatctgttgaaaattgtggcgcggttggggcatgcggtggcagcaacgggcttagtcggtggtcaagtggtggacttagagtgtgaaggacagcccgacattggtctggaaacgctgcattttatccactcccacaaaacgggggccctactggaggcctctgtggtgtctggggcattgctgacgggggcgcatgaatctgacgtggcacgcctgtcccgttatgcggcaaatattggcttggcattccagattgtggatgacattttggatattacttcgacccgcgatgtcctcggtaaaaccgttggtaaagatgtggctgcccaaaaaatgacctacccgcgcctgtggggtctggaaaaatctcgccaagaggctgagcgcttggtggcggaggcgaaggcagagttggctgtatatggggcggccgctgttcctttgcaggcgatcgccgactacattaccagccgtagtcattaa

SEQ ID NO: 6388 - protein, 307 aa, Synechococcus elongatus
MISADPPQVHPAGTFDVKAYLKERQALVEAALEASIPVAYPEKIYDAMRYSLMAGGKRLRPILCLATCELMGGTVEMAMPTACALEMIHTMSLIHDDLPAMDNDDYRRGKPTNHKVYGEDIAILAGDGLLAYAFEYVVEQTKNVPAEYLLKIVARLGHAVAATGLVGGQVVDLECEGQPDIGLETLHFIHSHKTGALLEASVVSGALLTGAHESDVARLSRYAANIGLAFQIVDDILDITSTRDVLGKTVGKDVAAQKMTYPRLWGLEKSRQEAERLVAEAKAELAVYGAAAVPLQAIADYITSRSH

SEQ ID NO: 6389 - DNA, 1341 bp, Mentha piperita
  CDS (82)..(1215)
tgacgttgttgtttcttggcacagatttccagttgcagtgctgggttaatatttactaatatatctttttttgagggaaaaatgagtgctcttgttaatcctgtggcgaaatggcctcagacgatcggcgttaaagatgttcacggcggccggaggcggagatccagatccactctctttcaatcccatccacttcgcactgaaatgcctttctctctctacttctcatcccccctcaaagctcccgccactttttccgtttctgcagtttataccaaagagggcagcgaaattagggataaagatccggcgccttcgacttcgccggcgttcgatttcgacggatacatgctccggaaggcgaaatccgtcaacaaggcgttggaagcggcggtgcagatgaaggagccgctgaagatccacgagtccatgcggtactcccttctcgccggcggcaagagagtgcgtcctatgctgtgcatcgcggcctgcgagctcgtcggcggcgacgagtccacggcgatgccggcggcctgcgccgtcgagatgatccacacgatgtcgctgatgcacgacgacctcccatgcatggacaacgacgacctccgccgcggcaagccgacgaaccacatggctttcggcgagagcgtggcggtcctcgccggcgacgccctcctctccttcgcgttcgagcacgtggcggcggcgaccaaaggcgcgccgccggagcggatcgtgagggtcctcggcgagctggctgtctcgatcgggtcggaggggctggtggcggggcaggtggtggacgtctgctcggaggggatggcggaggtcgggctggaccacctcgagttcatccaccaccacaagacggcggcgctgctgcaggggtcggtggttctgggggcgattttgggcggcggaaaggaggaggaggtggcgaagctgagaaaattcgcgaattgcatcggattgctgtttcaggtggtggacgatatcctagatgtgacgaaatcgtccaaggaattggggaagacggcggggaaggatctggtggcggataaaaccacatatccgaagctaataggcgtggagaaatccaaggaattcgcggatcggttgaacagggaggcgcaggagcagctcctccattttcatcctcatagggcagctccattgattgctctcgccaattatattgcttatagggacaattgattccatcttcctcctctcacaatcttcacttcactcaataaacacaaacatgatgctcctttctactcacaaattattcaaataaaaaaatttaaatgcttgttattcaaaaaaaaaaaaaaaaaa

SEQ ID NO: 6390 - protein, 377 aa, Mentha piperita
MSALVNPVAKWPQTIGVKDVHGGRRRRSRSTLFQSHPLRTEMPFSLYFSSPLKAPATFSVSAVYTKEGSEIRDKDPAPSTSPAFDFDGYMLRKAKSVNKALEAAVQMKEPLKIHESMRYSLLAGGKRVRPMLCIAACELVGGDESTAMPAACAVEMIHTMSLMHDDLPCMDNDDLRRGKPTNHMAFGESVAVLAGDALLSFAFEHVAAATKGAPPERIVRVLGELAVSIGSEGLVAGQVVDVCSEGMAEVGLDHLEFIHHHKTAALLQGSVVLGAILGGGKEEEVAKLRKFANCIGLLFQVVDDILDVTKSSKELGKTAGKDLVADKTTYPKLIGVEKSKEFADRLNREAQEQLLHFHPHRAAPLIALANYIAYRDN

SEQ ID NO: 6391 - DNA, 1140 bp, Arabidopsis thaliana
  CDS (1)..(1140)
atgattggtggcagaagctgtgttggaaatttggtatttctccggcgagatttggctacttgcagagctgttccggctaaatccaaggagaattctctggtcaacggtattggtcaagatcaaacagtgatgctcaatctgaggcaagagtcacgaaagccaatatctttggaaactctgtttgaggtcgtagctgatgatttgcagaggttgaacgacaatcttttatcgattgttggtgcagaaaatccggttttgatatctgctgctgagcaaatcttcagcgctggtggcaagaggatgagaccgggtttggtattccttgtatcacgagccactgcggaattagcaggcttaaaggaacttacagtagaacatcggcgtttaggtgagatcattgagatgattcacaccgcaagtttgatacacgatgatgtgttagacgaaagtgatatgcgaagaggaagggaaacggttcacgagctattcggaacaagagtagctgtattagctggggatttcatgtttgctcaagcatcatggtacttagcaaatctcgaaaaccttgaagtcattaagctcataagtcaggtgatcaaagattttgcaagcggtgagataaagcaagcatcgagtttattcgattgtgatgtcaagcttgatgactacatgctaaagagttactacaagacagcttcattagtagctgcaagcaccaaaggagcagcaattttcagtaaagtcgaaagcaaggtcgcagagcaaatgtatcagttcgggaagaatctcggtttatcttttcaagtagttgatgacattctggacttcactcagtccacagagcagttaggtaagcctgcagctaatgacctagccaaaggtaacataacggcgccagtgatcttcgcgctagagaatgagccaaggctaagagagatcattgagtctgagttttgtgagcctggatcgcttgaagaagcgattgaaatagttagaaatcgcggtgggatcaagaaagctcaagaattagcaaaggagaaagctgaacttgcgttaaagaatttgaattgtcttcctaggagtggtttcagatcggctcttgaggatatggtaatgtttaatcttgaaaggattgattag

SEQ ID NO: 6392 - protein, 379 aa, Arabidopsis thaliana
MIGGRSCVGNLVFLRRDLATCRAVPAKSKENSLVNGIGQDQTVMLNLRQESRKPISLETLFEVVADDLQRLNDNLLSIVGAENPVLISAAEQIFSAGGKRMRPGLVFLVSRATAELAGLKELTVEHRRLGEIIEMIHTASLIHDDVLDESDMRRGRETVHELFGTRVAVLAGDFMFAQASWYLANLENLEVIKLISQVIKDFASGEIKQASSLFDCDVKLDDYMLKSYYKTASLVAASTKGAAIFSKVESKVAEQMYQFGKNLGLSFQVVDDILDFTQSTEQLGKPAANDLAKGNITAPVIFALENEPRLREIIESEFCEPGSLEEAIEIVRNRGGIKKAQELAKEKAELALKNLNCLPRSGFRSALEDMVMFNLERID

SEQ ID NO: 6393 - DNA, 1057 bp, Scoparia dulcis
  CDS (1)..(1056)
atgagccttgtaaaccccgtctccacatggccaaaccccacccggagctccgtattccgacccaaacccgccatcctcaacacgacccacttacccatctccttcctattcgccggaaaacccatctccgccgtcctcaccaaagagtacagccaccaaacctcctccaccttcgacttcaagaagtacatgctcgagaaagcctcctccgtcaacaaagccttagaatccgcagtctccctcaaagaacccctcaagatccacgaatctatgcgctactctcttctcgcggggggcaaaagggtccgccccatgctctgcctcgccgcctgcgagctcgtcggcggccacccctccaccgccatgcctgccgcctgctccatcgagatgatccacaccatgtccctcatgcacgacgacctcccctgcatggacaacgaccatctccgccgcggccatcccactaaccacatcgtcttcggagaggacgtcgctgtcctcgccggcgacgctcttcttgcctattccttcgaatacttagccaccgcgacagagggagtccttcctgaacggatagtcagagtgatcgccgagttggcgaaatgtatccgctcagaaggccttctggcggggcaggtggtggatatatgctctgaaggcgtgagcgagatcgggttggagcatttggagtacatacatttgcacaagacggcggcgttgctcgagggctcggtcgtcttgggcgcgattttgggtggcgggaatgatgaagaggttgaaaggttgaggaagtttgccaggtgtattgggctgttgtttcaggtggtggatgatattcttgatgttactaaaacgtcggtggagctggggaagacggccgggaaagatttggtggcggataagaccacgtatccgaagctgattgggattgagaagtcgagggagtttgcggagaagttgaaccgggaggcgcaggaacagcttgtagggtttgattcggataaggccgcgccgttgattgcgctcgcgaattatattgcgtatagggagaattgag

SEQ ID NO: 6394 - protein, 351 aa, Scoparia dulcis
MSLVNPVSTWPNPTRSSVFRPKPAILNTTHLPISFLFAGKPISAVLTKEYSHQTSSTFDFKKYMLEKASSVNKALESAVSLKEPLKIHESMRYSLLAGGKRVRPMLCLAACELVGGHPSTAMPAACSIEMIHTMSLMHDDLPCMDNDHLRRGHPTNHIVFGEDVAVLAGDALLAYSFEYLATATEGVLPERIVRVIAELAKCIRSEGLLAGQVVDICSEGVSEIGLEHLEYIHLHKTAALLEGSVVLGAILGGGNDEEVERLRKFARCIGLLFQVVDDILDVTKTSVELGKTAGKDLVADKTTYPKLIGIEKSREFAEKLNREAQEQLVGFDSDKAAPLIALANYIAYREN

SEQ ID NO: 6395 - DNA, 1107 bp, Croton sublyratus
  CDS (1)..(1107)
atgagttctgtgaatttaggttcatgggttcatacttcctctgttataagtcaagctaccagatccagatccaaatccaaacccttatcgttttctcctgtttcgattcctctgttttaccgaaactcaaaacgcagcgtttcgtatgtttcagcgatcgtgactaaggatgaggagacgattcaggaagaacagaataagaattcaagttcttctcttggttttgatttcaaatcttacatggttcaaaaggctagtgctattaatcaagctttggaagctgctgtttcgcttcgcgagcctcttaaaattcatgaatctatgcggtactcacttttggccggcggtaagcgagtccggccggctttatgtcttgctgcgtgtgaacttgttggcggagatgaatctatggcgatgcctgctgcttgtgctgttgaaatgatacatactatgtcgcttatacatgacgacctgccgtgcatggataacgacgatctccgtcgtggtaagccgacgaatcatattgtgtttggtgaaaatgtggcggttcttgcaggtgatgcgcttcttgcttttgcttttgaacatattgctgtttctactttaaatgtttctcctgtcagaattgttcggggggtaggtgaattggctaaggcgattggtgctgaaggattggttgctggacaggttgttgatatctgttctgaaggtttatctgaagtagatttagaaaagcttgaatttattcatattcataagacagcaaaattgctggaaggagcggtggtgttaggggcaattatgggcggaggaaccgatgaagaggtggaaaaattgaggaaatatgcaagggatattgggttgttgtttcaggtagtggatgatattcttgatgtgaccaaatcgtctcaagaattggggaaaactgcaggaaaggatttggtggcggataaggttacttatcctaagttaatggggattgagaaatcaagggaatttgctgagaagttgaataaagaagctcaggagcaattggctggtttcgatcctgagaaggcggctccattgattgctttagctaattacattgcatacaggcaaaactaa

SEQ ID NO: 6396 - protein, 368 aa, Croton sublyratus
MSSVNLGSWVHTSSVISQATRSRSKSKPLSFSPVSIPLFYRNSKRSVSYVSAIVTKDEETIQEEQNKNSSSSLGFDFKSYMVQKASAINQALEAAVSLREPLKIHESMRYSLLAGGKRVRPALCLAACELVGGDESMAMPAACAVEMIHTMSLIHDDLPCMDNDDLRRGKPTNHIVFGENVAVLAGDALLAFAFEHIAVSTLNVSPVRIVRGVGELAKAIGAEGLVAGQVVDICSEGLSEVDLEKLEFIHIHKTAKLLEGAVVLGAIMGGGTDEEVEKLRKYARDIGLLFQVVDDILDVTKSSQELGKTAGKDLVADKVTYPKLMGIEKSREFAEKLNKEAQEQLAGFDPEKAAPLIALANYIAYRQN

SEQ ID NO: 6397 - DNA, 1324 bp, Daucus carota
  CDS (84)..(1184)
cagtacatctctatatctgtacgaaccttcactaagctgcaacagaaaaattctctatacccagaacaaatccttactttggaatggcaagtgttatgaatctaagcataacccatttttgtagctctcatcttaagcagaaatcacctaacaaacttgttttccatggcctcaactcaaaccctaatttctcgaaatcaaagccaccacaaaatgtcatcccatattcatctctgtccatatcttccgtacaaacaactaaaatagtcatggattcatcgcccacaccctccacatttgatttcaagtcatacatgctcgaaaaggccatttctgtcaacaaagccctagacgcttcagtctcactccaagagcctgtcaaaatacacgagtcaatgcgttactccctccttgcagggggcaagcgtgtccgtcctcttcttagtattgcagcctgcgagctttttggagggcacgaggccgtggccatgccctccgcttgtgctgtggagatgatccacacgatgtccctcatgcacgacgatctcccttttatggacaatgatgatctgcgtcgaggcaagcctactaaccacaaagtctatggtgaaagcgttgctgttcttgctggagacgcgatgttagccctggcggctttccaccttgtagctactgagaccagaggagtctcgtcggatcaggtggttagagtgatcgttgagctggctaaggcaataggcgcagaagggttggttgcaggacagattgtggatgtatgttctgaaggtgatcctaatctcggattagaagatttggagtttattcatcggagcaaaactgcagcattactggaaggttcggttgtgatgggggcaattttgggaggtgcaaatgatgaggaagttgagaaagtgagaaagtatgctaggtgcattggattgttgtttcaagtagttgatgatattcttgatgtcacaaagtcttccaaagaattaggaaaaacggctgggaaagatttggtggccgataagacgacgtatcctaaacttattgggattgagaaatcaagagagttttctgatgagttgaaaagggaagctatagatcagcttgctggatttaattcagataagactgcgcctttgattgctatggctaattacattgcaaatcgagataactgaaatgtgtttaaaaatcagaactgcttaattctgttgctctagcatgtttaagaagaaaatgctgatatatttccagaactagttggttaatttttcatgaataatcagcacttatgttttttcaaaaaaaaaaaaaaaaa

SEQ ID NO: 6398 - protein, 366 aa, Daucus carota
MASVMNLSITHFCSSHLKQKSPNKLVFHGLNSNPNFSKSKPPQNVIPYSSLSISSVQTTKIVMDSSPTPSTFDFKSYMLEKAISVNKALDASVSLQEPVKIHESMRYSLLAGGKRVRPLLSIAACELFGGHEAVAMPSACAVEMIHTMSLMHDDLPFMDNDDLRRGKPTNHKVYGESVAVLAGDAMLALAAFHLVATETRGVSSDQVVRVIVELAKAIGAEGLVAGQIVDVCSEGDPNLGLEDLEFIHRSKTAALLEGSVVMGAILGGANDEEVEKVRKYARCIGLLFQVVDDILDVTKSSKELGKTAGKDLVADKTTYPKLIGIEKSREFSDELKREAIDQLAGFNSDKTAPLIAMANYIANRDN

SEQ ID NO: 6399 - DNA, 1104 bp, Daucus carota
  CDS (1)..(1104)
atggcgtttattcaaaccaatacagcccatgaaaactcactcttgtccaagaatttactgttcgatcatctcaaaaacactggtaaaaccccatcaagctactgcactagacatcatcctatgaagattcaaggcgcaaatgctgtgaattcaactcttgtccaatcagttaacgtccaagaactcctgacaaatccccgtgttacgcctggtccagagtttcattttgaaggttacatgaaaacctcaggtaaaaagataaacaaagcgctggacgaggctgttccagtgcaaaaaccagctatcatccacgaagcgatgcggtattcgcttctggccgggggcaaacgcgtccggccagtgctgtgcatcgcttcgtgtgagttggtaggagggctggagtcatgggctatgcccatggcctgcgccctcgaaatgatccacaccatgtctctaatccatgacgacctcccgtgcatggataacgacgacttgagacgtggcaaaccgacgaatcacaaggtttatggcgaagaaaccgcgattcttgcaggtgatgccttgctctccctagcattcgagcatgtagcggacgcaaccgatatggtgaccccgggtcgggtggttcgggctattgcggagctaggttcggctgtgggctcacaagggctcgtggcgggtcagataatggacatatgtaaccaaggaaaagacgtggatttgaacgacttggagtatattcatgtccacaaaacatcgaagcttctagaagcttcggtggtttgtggagctatattgggaggtgggaatgttattgaggtggagaggttgagaaaatatgcgaggtgtattggattgttgtttcaagtggttgatgatattttagatgttaccaaatcatctgcggagctcgggaagacagccgggaaagatttagtcaccgataagacgacgtatccgaagctaatgggattggagagggctaagagattcgcgacggagctggtggctcaggcggaggaggaactcagttattttggatcgtcagcaagggtggccccgttgtaccatctggctaagtatattgcttatagacaaaactga

SEQ ID NO: 6400 - protein, 367 aa, Daucus carota
MAFIQTNTAHENSLLSKNLLFDHLKNTGKTPSSYCTRHHPMKIQGANAVNSTLVQSVNVQELLTNPRVTPGPEFHFEGYMKTSGKKINKALDEAVPVQKPAIIHEAMRYSLLAGGKRVRPVLCIASCELVGGLESWAMPMACALEMIHTMSLIHDDLPCMDNDDLRRGKPTNHKVYGEETAILAGDALLSLAFEHVADATDMVTPGRVVRAIAELGSAVGSQGLVAGQIMDICNQGKDVDLNDLEYIHVHKTSKLLEASVVCGAILGGGNVIEVERLRKYARCIGLLFQVVDDILDVTKSSAELGKTAGKDLVTDKTTYPKLMGLERAKRFATELVAQAEEELSYFGSSARVAPLYHLAKYIAYRQN

SEQ ID NO: 6401 - DNA, 1131 bp, Oryza sativa subsp
  CDS (1)..(1131)
atgcacgtcctcgctcaatccacggccgtggccaaggtcgccgcctccggctgcctccgacgaagcccgaacccctccgtgacgttccagagatccccttcccttcttctctcgccggccgcgtgccgccgccgctgccgccgcgggtgctccgtctccgtcgacgtgaggtgctccctgggcgccatggtcacgccggagctgaacggcggcgacgtcggcgtcggcgtcggcggtggtagcttcgactttcagcggtatctgtctgccagggccgacgccgtgcacgacgcgctggaccgggccatgccgcgcggcttcccggagcggctctgcgagtccatgcgctactccgtcctcgccggcggcaagcgggtgcgccccgtgctcgcgctggccgcgtgcgagctcgtcggcggggacgccgcggcggccacgcccgtcgcctgcgcggtcgagatgatccacaccatgtcgctcatccacgacgacatgccgtgcatggacgacgacgccctccgccggggccgcccctccaaccacgtcgccttcggcgagttcaccgccctcctcgccggcgacgcgctccacgccctcgcgttcgagcacgtggcgcgcggctgcggcgaccacggcgtccccgcggaccgcacgctccgggcggtcgccgagctcgggagcgcctcgggcaccggcggggtcgccgccgggcaggtcgccgacaaggagagcgagggcctccccgtcagcctcgccatgctggagtacatccacgtgcacaagacggcgaggctcctcgaggccgccgccgtgtccggcgccatcgtcggcgggggcgcggacgccgaggtggagagggtccggcggtacgcgcgctgcgtcgggctcctcttccaggtggtcgacgacgtgctcgacatgacgagcacatcggagcagctcgggaagacggccgggaaggacgtcgaggccgacaaggccacttacccgaagctgctcggcgtcgacaaggcccgcgagtacgccgccgacctcctcgccatggccgaggcggagctcgacgggttcgacgccgagcgcgccgcgccgctgcgacacctcgcgcggttcatcgcctacaggcagcattaa

SEQ ID NO: 6402 - protein, 376 aa, Oryza sativa subsp
MHVLAQSTAVAKVAASGCLRRSPNPSVTFQRSPSLLLSPAACRRRCRRGCSVSVDVRCSLGAMVTPELNGGDVGVGVGGGSFDFQRYLSARADAVHDALDRAMPRGFPERLCESMRYSVLAGGKRVRPVLALAACELVGGDAAAATPVACAVEMIHTMSLIHDDMPCMDDDALRRGRPSNHVAFGEFTALLAGDALHALAFEHVARGCGDHGVPADRTLRAVAELGSASGTGGVAAGQVADKESEGLPVSLAMLEYIHVHKTARLLEAAAVSGAIVGGGADAEVERVRRYARCVGLLFQVVDDVLDMTSTSEQLGKTAGKDVEADKATYPKLLGVDKAREYAADLLAMAEAELDGFDAERAAPLRHLARFIAYRQH

SEQ ID NO: 6403 - DNA, 1889 bp, Taxus canadensis
  CDS (308)..(1489)
ggaagagcggcaatcattctgtcatttaaaggttttctgcaccgaaatcctttaattttaaggttttctggaaggtgtgtgtgaaaatttgaagaaaattaacaagactgtaagtgtttttatatatttatgagctttggtttacttgggtgttactgaattggaacatacgtgcatgtcggagcaaagcagcatatttgaaatttgtgggtgttctttgaggtgtgttgcggatatagatttgattgttcagagttagtgtattttttttttttgttggttagattaattgggcaagttatagagaatggcttacacggcaatggcagcagggacccaaagcttgcaactccgcactgttgcttcctatcaagaatgcaatagtatgaggagttgttttaaattgacaccttttaaaagttttcatggagtgaatttcaatgttccctcactgggtgctgctaattgtgagattatgggtcacctgaaacttgggtcattgccatataaacaatgttcggtgtcatctaaatccacaaaaacaatggcccagttggttgatttggctgaaacagagaaggcggagggaaaggatattgaatttgatttcaacgagtatatgaagtccaaggctgtggcagtggatgcggcactggataaggcaatcccacttgaatatcctgaaaaaatacatgaatcaatgaggtattcacttctagcaggaggtaagcgcgtcaggcctgctctgtgcattgcagcatgtgagcttgtaggagggagtcaggaccttgccatgccaactgcctgtgcaatggagatgattcataccatgtctctgattcatgatgacttgccgtgcatggataatgatgatttcagaagagggaagccaacaaatcacaaggtctttggagaggacactgctgttcttgcaggggacgccctgctttcatttgcatttgagcatattgctgtggctacaagcaagactgtgcctagtgataggactttaagggtgatatctgaattgggtaagacaataggctctcaagggcttgtaggggggcaggtggttgatattacatccgagggggatgctaatgtggacctgaaaaccctggaatggattcatatacacaagactgctgtgctcttggaatgttcagttgtgagtggagggatccttggtggtgctacagaggacgagattgcgagaattcggcggtacgcccggtgtgtggggcttctgtttcaggttgtggatgacatacttgatgtcactaaatcttctgaagaattgggaaagactgcaggaaaggatttgcttactgataaggctacttatcccaagttgatgggcctggagaaagcaaaagaatttgccgctgaattggcgacgagagccaaggaagagctgtcatcctttgatcagataaaggctgcacctttgttgggtcttgcagattacattgcattcaggcaaaactgagaacaaagctgtaaagctattcttacatatcatctgtttttttttgacatctgctgaaaattagcaaataactttttcaagtttgtatctcccctgaatcataacgattcaggacatgaggtttctggtaccattgaaaagggggcgctcattgtagttgttttttagctaattccaacctgttttctatgtttccactttggatcaatttgatgtagattatgtttgtaggggtgacattgttagacttgttacatgtcatcaaattgttttttgcggccttaacatggttttaacttttcactagcaataaggtggcctaaagtgtttatgtaatttttcaatatagatagatatcttttaacaaaaaaaaaaaaaaaaaaaaaaaaaaaaaaaaaaa

SEQ ID NO: 6404 - protein, 393 aa, Taxus canadensis
MAYTAMAAGTQSLQLRTVASYQECNSMRSCFKLTPFKSFHGVNFNVPSLGAANCEIMGHLKLGSLPYKQCSVSSKSTKTMAQLVDLAETEKAEGKDIEFDFNEYMKSKAVAVDAALDKAIPLEYPEKIHESMRYSLLAGGKRVRPALCIAACELVGGSQDLAMPTACAMEMIHTMSLIHDDLPCMDNDDFRRGKPTNHKVFGEDTAVLAGDALLSFAFEHIAVATSKTVPSDRTLRVISELGKTIGSQGLVGGQVVDITSEGDANVDLKTLEWIHIHKTAVLLECSVVSGGILGGATEDEIARIRRYARCVGLLFQVVDDILDVTKSSEELGKTAGKDLLTDKATYPKLMGLEKAKEFAAELATRAKEELSSFDQIKAAPLLGLADYIAFRQN

SEQ ID NO: 6405 - DNA, 909 bp, Pantoea ananas
  CDS (1)..(909): transl_table=11
atgacggtctgcgcaaaaaaacacgttcatctcactcgcgatgctgcggagcagttactggctgatattgatcgacgccttgatcagttattgcccgtggagggagaacgggatgttgtgggtgccgcgatgcgtgaaggtgcgctggcaccgggaaaacgtattcgccccatgttgctgttgctgaccgcccgcgatctgggttgcgctgtcagccatgacggattactggatttggcctgtgcggtggaaatggtccacgcggcttcgctgatccttgacgatatgccctgcatggacgatgcgaagctgcggcgcggacgccctaccattcattctcattacggagagcatgtggcaatactggcggcggttgccttgctgagtaaagcctttggcgtaattgccgatgcagatggcctcacgccgctggcaaaaaatcgggcggtttctgaactgtcaaacgccatcggcatgcaaggattggttcagggtcagttcaaggatctgtctgaaggggataagccgcgcagcgctgaagctattttgatgacgaatcactttaaaaccagcacgctgttttgtgcctccatgcagatggcctcgattgttgcgaatgcctccagcgaagcgcgtgattgcctgcatcgtttttcacttgatcttggtcaggcatttcaactgctggacgatttgaccgatggcatgaccgacaccggtaaggatagcaatcaggacgccggtaaatcgacgctggtcaatctgttaggcccgagggcggttgaagaacgtctgagacaacatcttcagcttgccagtgagcatctctctgcggcctgccaacacgggcacgccactcaacattttattcaggcctggtttgacaaaaaactcgctgccgtcagttaa

SEQ ID NO: 6406 - protein, 302 aa, Pantoea ananas
MTVCAKKHVHLTRDAAEQLLADIDRRLDQLLPVEGERDVVGAAMREGALAPGKRIRPMLLLLTARDLGCAVSHDGLLDLACAVEMVHAASLILDDMPCMDDAKLRRGRPTIHSHYGEHVAILAAVALLSKAFGVIADADGLTPLAKNRAVSELSNAIGMQGLVQGQFKDLSEGDKPRSAEAILMTNHFKTSTLFCASMQMASIVANASSEARDCLHRFSLDLGQAFQLLDDLTDGMTDTGKDSNQDAGKSTLVNLLGPRAVEERLRQHLQLASEHLSAACQHGHATQHFIQAWFDKKLAAVS

SEQ ID NO: 6407 - DNA, 1137 bp, Schizosaccharomyces pombe
  CDS (1)..(1137)
atgattcagtatgtatatttaaaacatatgaggaaattatggagtcttggaaaagtccgttcgactgttcttcggttttctactacgaaccgcaatgcttcacatttaattaaaaacgagttggaacaaatctcaccagggattcgtcaaatgctgaattcaaattcagaatttcttgaagagtgttctaaatattataccattgctcaaggaaaacaaatgcgtccttctcttgttttgctgatgtccaaagctacaagcttgtgccatggtattgatcggtccgtagtgggcgacaaatatattgatgatgatgatttaagatcattttcgacgggtcaaattcttccttctcaattgagattagcacaaataaccgagatgatccatatagcaagtttgctgcatgacgatgtgattgatcacgctaatgtccgtagaggctcaccttcaagcaatgttgctttcggtaatcgacggtcaatccttgcgggtaatttcatccttgcacgggcttcgactgctatggcccgccttcgaaatccccaagttacggagttgttagctacagtgatagcagacttggttcgaggtgagtttttgcagctaaaaaatactatggatccttcatctttggaaataaaacaatcaaattttgactattatattgaaaaaagttttttgaaaacagccagtttaatttccaaaagctgcaaggcttctacaatcctcggacaatgttctcctactgtagcaacagctgctggagaatacggtcgatgcattggtactgcttttcaactaatggatgacgtgttggactatacgtcgaaagatgatactttaggaaaggcggctggtgcagatttgaagctagggttggctacagctcccgtcctctttgcatggaaaaagtatccagaacttggtgcaatgattgtgaatagattcaatcatccttctgatatccaacgggctcgttctttggttgagtgcactgatgctatcgagcaaaccatcacttgggcaaaagaatatatcaaaaaagccaaagattcccttctgtgtctccctgattcacctgcaaggaaggcactttttgcgttggctgataaagtaataacgagaaagaagtga

SEQ ID NO: 6408 - protein, 378 aa, Schizosaccharomyces pombe
MIQYVYLKHMRKLWSLGKVRSTVLRFSTTNRNASHLIKNELEQISPGIRQMLNSNSEFLEECSKYYTIAQGKQMRPSLVLLMSKATSLCHGIDRSVVGDKYIDDDDLRSFSTGQILPSQLRLAQITEMIHIASLLHDDVIDHANVRRGSPSSNVAFGNRRSILAGNFILARASTAMARLRNPQVTELLATVIADLVRGEFLQLKNTMDPSSLEIKQSNFDYYIEKSFLKTASLISKSCKASTILGQCSPTVATAAGEYGRCIGTAFQLMDDVLDYTSKDDTLGKAAGADLKLGLATAPVLFAWKKYPELGAMIVNRFNHPSDIQRARSLVECTDAIEQTITWAKEYIKKAKDSLLCLPDSPARKALFALADKVITRKK

SEQ ID NO: 6409 - DNA, 1116 bp, Arabidopsis thaliana
  CDS (1)..(1116)
atggcttcagtgactctaggttcatggattgttgttcaccaccacaatcatcatcatccatcttcaatccttaccaaatccagatccagatcttgtcctataactcttactaaacccatctcctttcgatcaaaacgcaccgtttcatcatcttcttcaatcgtttcttcttccgttgttacaaaagaagacaatctacgccaatctgaaccatcctctttcgatttcatgtcgtacatcatcaccaaagccgaattagtcaacaaagctttagattcagctgttcctctccgtgagccactcaagatccacgaagcgatgcgttactctcttctcgccggtggcaaaagagttagaccagttctctgcatcgctgcttgtgaactcgtcggaggtgaagaatcaaccgctatgccagcagcttgcgccgtcgagatgattcacaccatgtcgttgatccacgacgatctcccttgtatggataacgacgatctccgccgtggaaaaccgaccaaccacaaagtgtttggtgaagacgtcgctgttttagccggagacgcgcttctctctttcgctttcgagcatttagcttcggcgacgagttctgatgttgtttctccggtgagagtggttcgagccgttggagaattggctaaagcgataggaacagaagggttagtggcgggtcaagtcgtggatattagtagtgaagggttagatttaaacgacgtcggtttagagcatttggagtttatccatttgcataaaacggcggcgttgcttgaagcttctgctgttttgggagctattgttggtggaggaagtgatgatgagattgagaggttaagaaagtttgcgagatgtattggtttgttgtttcaggtggttgatgatatcttggatgtgacgaaatcgtcgaaagagttagggaaaactgctgggaaagatttgattgctgataagttgacgtatcctaagattatgggtttggagaaatcgagagagtttgctgagaaattgaatagagaggctcgtgatcagcttttagggtttgattctgataaggttgctcctttgttggctttggctaattacattgcctatagacagaactga

SEQ ID NO: 6410 - protein, 371 aa, Arabidopsis thaliana
MASVTLGSWIVVHHHNHHHPSSILTKSRSRSCPITLTKPISFRSKRTVSSSSSIVSSSVVTKEDNLRQSEPSSFDFMSYIITKAELVNKALDSAVPLREPLKIHEAMRYSLLAGGKRVRPVLCIAACELVGGEESTAMPAACAVEMIHTMSLIHDDLPCMDNDDLRRGKPTNHKVFGEDVAVLAGDALLSFAFEHLASATSSDVVSPVRVVRAVGELAKAIGTEGLVAGQVVDISSEGLDLNDVGLEHLEFIHLHKTAALLEASAVLGAIVGGGSDDEIERLRKFARCIGLLFQVVDDILDVTKSSKELGKTAGKDLIADKLTYPKIMGLEKSREFAEKLNREARDQLLGFDSDKVAPLLALANYIAYRQN

SEQ ID NO: 6411 - DNA, 1131 bp, Arabidopsis thaliana
  CDS (1)..(1131)
atggaaccacaaattctttttctctatctctcactcttcattctctccctaaacttcttcttcacgaatcttaaaccaaggctagtccgcctcttccagccttctttagaatctcgtgtcaagaccgctcttttatcccgaaaggaagtagccgcgtttcttgattctcccattgtcgaagacgaagaaggcgaagaaagagaagaggaagaagaaggaggtatcgtttcaaatgccaactttacgtttgagtttgatccatacatgatgagcaaagccgaatcagtgaacaaagctctagaagaagcaattccagtcggagagccactcaagattcatgaagccatgcgatacgcgattcttgcggctggaaaacgtgttaggccaatactctgccttgcttcttgcgagctagtaggtggccaagaaaatgcggcaatgcccgccgcttgtgcggttgagatgatccacacgatgtctctaatcaaagacgatttgccttgtatggacaacgacgatttgcgtcgtggaaagcccacgacgcacaaagtctacggcgaaggagttgccattctctctggtggggctctcttgtctcttgcctttgagcacatgaccaccgctgaaatatcctcggagagaatggtttgggcggtgagagaattggctaggtctattgggacaagaggtttagtcgcgggacaagcgatggatataagcagtgaaggtttggacttaaacgaggtcggattagagcatttggagtttatccatgttcataaaaccgcggttttgttggaaactgccgcggttcttggcgccataattggtggtggatctgatgaagagattgaaagtgtgagaaagtttgcaaggtgcattggattgttgtttcaggtggtggatgatattttggacgagacgaagtcgtcggaggaattgggaaaaaccgccgggaaagatcagctcgccggaaagctaacgtatccaaagttgatagggttggagaaatcgaaagaatttgttaagagattgacgaaagatgcacggcaacatcttcaagggtttagttctgaaaaggttgctcctttagtagctcttactacttttattgctaatagaaataagtga

SEQ ID NO: 6412 - protein, 376 aa, Arabidopsis thaliana
MEPQILFLYLSLFILSLNFFFTNLKPRLVRLFQPSLESRVKTALLSRKEVAAFLDSPIVEDEEGEEREEEEEGGIVSNANFTFEFDPYMMSKAESVNKALEEAIPVGEPLKIHEAMRYAILAAGKRVRPILCLASCELVGGQENAAMPAACAVEMIHTMSLIKDDLPCMDNDDLRRGKPTTHKVYGEGVAILSGGALLSLAFEHMTTAEISSERMVWAVRELARSIGTRGLVAGQAMDISSEGLDLNEVGLEHLEFIHVHKTAVLLETAAVLGAIIGGGSDEEIESVRKFARCIGLLFQVVDDILDETKSSEELGKTAGKDQLAGKLTYPKLIGLEKSKEFVKRLTKDARQHLQGFSSEKVAPLVALTTFIANRNK

SEQ ID NO: 6413 - DNA, 1308 bp, Arabidopsis thaliana
  CDS (38)..(1120)
acatttataaagttctattagagacggtggataggccatggctactactgttcatctcagctcattctccctcttcatccaatccagaggaagaagagacaactccatatcttccgtcaagagtctcaaaaaacgcacaggtttgtctccctcttctgccctcacctcacaaggtggcagagacatgattccaccagagggaaaatgcaatgatcacaactctgcttttgatttcaagttgtatatgatccgcaaagccgaatctgtaaatgcggctctcgacgtttctgtaccgctccgagaacccctcactgtccaggaagccgtgcggtactcattgctagcgggcggaaaacgtgtgaggcctctgctctgcattgccgtctgcgagcttgtgggaggcgacgaggctactgccatgtcagctgcttgcgcggttgagatgatccacacaagctctcttattcatgacgatcttccgtgcatggacaatgccgacctccgcagaggcaagcccaccaaccacaaggtatatggagaagacatggcggttttggcaggtgatgcactccttgcattggcgtttgagcacatgacggttgtgtcgagtgggttggtcgctcccgagaggatgattcgcgcggtggttgagctggccagggccatagggactacagggctagttgctggacaaatgatagacctagccagcgaaagactgaatccagacaaggttggattggagcatctagagttcatccatctccacaaaacggcggcattgttggaggcagcggcggttttaggggttataatgggaggtggaacagaggaagagatcgaaaagcttagaaagtatgctaggtgtattggactactgtttcaggtggttgatgacattctcgacgtaacaaaatctactgaggaattgggaaagactgcaggaaaagacgtaatggctggaaagctgacgtatccaaggctgataggtttggagagatcaaaggaagttgcagagaaactgaggagagaagcagaggaacaacttctagggtttgatccaagtaaggcggcgcctctggtggctcttgctagctacatcgcttgcagacacaactgaatggactgatcatatcctcaatgcatcaatctcctaacaagtccttttacttagatctatggtcttgtttcttataaatcatctatgccgtgtgatcatctctctcatttgttttcaagttgtattatgtttttgaatcttaataatgtaatgttcgaaaaatatcaataagatttgctcataggaac

SEQ ID NO: 6414 - protein, 360 aa, Arabidopsis thaliana
MATTVHLSSFSLFIQSRGRRDNSISSVKSLKKRTGLSPSSALTSQGGRDMIPPEGKCNDHNSAFDFKLYMIRKAESVNAALDVSVPLREPLTVQEAVRYSLLAGGKRVRPLLCIAVCELVGGDEATAMSAACAVEMIHTSSLIHDDLPCMDNADLRRGKPTNHKVYGEDMAVLAGDALLALAFEHMTVVSSGLVAPERMIRAVVELARAIGTTGLVAGQMIDLASERLNPDKVGLEHLEFIHLHKTAALLEAAAVLGVIMGGGTEEEIEKLRKYARCIGLLFQVVDDILDVTKSTEELGKTAGKDVMAGKLTYPRLIGLERSKEVAEKLRREAEEQLLGFDPSKAAPLVALASYIACRHN

SEQ ID NO: 6415 - DNA, 1119 bp, Arabidopsis thaliana
  CDS (1)..(1119)
atggaagctcaaaatatctttctctatcttttgatcgtctttctatctctacacttcgtgtttacaactctgaaaggacggctgagtcccgcgaatacacggcggcttatccgccttctccatatcccgatcaaatctccggtcgccgctgctattttcgctagaaaagacacccgtgagtttcttgattcatcaatcaaattagtaaacgaagaagacgatttcggtttcagtttcgatttcaaaccgtacatgatcagcaaagcagagacaataaacagagcattagatgaagcaattccacttattgagccactcaacatccacaaggcaatgcgttacgcgattctcgcaggcggaaaacgtgtcaggccaatactctgcctagccgcttgcgagctagtcggcggggaagagcgtttagcgattcaagcggcttgtgcagttgaaatgattcacacaatgtcactcatcaaagacgatcttccttgtatggacaacgacgatctccgacgagggaaaccaacaacacataaagtcttcggagaaagcgtagccatactctccggcggcgcacttttagctctagctttcgagcatttgacggaagctgacgtgtcatccaagaaaatggttcgagccgttaaagaattggctaagtctattggaacgaaaggactcgtagcgggacaggcgaaggatttaagcagtgaagggttggaacaaaacgatgtcggattagaggatcttgaatatattcacgttcataaaaccggttcgttgcttgaagcatctgcggttatcggagcggttataggcggtggaacagagaaagagatagagaaagtgagaaactttgcgaggtgtatcggattgttgtttcaggtggttgatgatatcttggatgagaccaagtcgtcggaggaattgggaaaaaccgccggaaaagataaggtcgccggaaagctgacgtatccaaaagtgattggtgttgagaaatctaaggagtttgtggagaagttgaagagagatgcgagagaacatcttcaagggtttgattctgacaaagtcaaacctttgatagctcttactaacttcattgccaacagaaaccactga

SEQ ID NO: 6416 - protein, 372 aa, Arabidopsis thaliana
MEAQNIFLYLLIVFLSLHFVFTTLKGRLSPANTRRLIRLLHIPIKSPVAAAIFARKDTREFLDSSIKLVNEEDDFGFSFDFKPYMISKAETINRALDEAIPLIEPLNIHKAMRYAILAGGKRVRPILCLAACELVGGEERLAIQAACAVEMIHTMSLIKDDLPCMDNDDLRRGKPTTHKVFGESVAILSGGALLALAFEHLTEADVSSKKMVRAVKELAKSIGTKGLVAGQAKDLSSEGLEQNDVGLEDLEYIHVHKTGSLLEASAVIGAVIGGGTEKEIEKVRNFARCIGLLFQVVDDILDETKSSEELGKTAGKDKVAGKLTYPKVIGVEKSKEFVEKLKRDAREHLQGFDSDKVKPLIALTNFIANRNH

SEQ ID NO: 6417 - DNA, 1011 bp, Arabidopsis thaliana
  CDS (1)..(1011)
atgcggccgcgttacagtctgattctgtctgcaatgcggctaatacgaccgtccaaccgccgtctaagttcgatcgcaagctccgactctgagttcatttcatacatgaagaataaggctaagtccatcaacaaagcactagacaattcaattcctctttgcaacaattttgttcctctttgggagccagtactcgaggttcacaaagctatgaggtacacgcttctcccaggcggaaaacgagtaaggccaatgctctgtttggtcgcttgcgagctcgtaggtggccaagagtcaaccgcaatgccagcagcctgtgcggttgagatgattcacgcagcgtcgctcatcctagacgaccttccttgtatggatgacgacagcctccgccgtggaaaacccaccaaccataaagtttttggcgagaaaacatccatcttggcctctaatgcgctcaggtctttggccgtcaagcagacattggcatcgacctcattgggggtgacttcagagagggttcttcgggctgttcaggagatggcgagagctgttgggacagagggacttgtggcaggccaagcagcggatttggccggagaaaggatgagttttaagaacgaagacgacgaattgagatatcttgagttgatgcatgttcataaaaccgcggttttggttgaagctgcggctgttgtgggagctataatgggaggtgggtccgatgaagagattgagaggcttaagagctacgcgaggtgcgttggactgatgtttcaggtgatggatgatgtactcgatgagaccaagtcttccgaggagcttgggaaaactgccggtaaagatttgatcaccggaaagctgacgtatccgaaggtgatgggtgtggacaatgcgagagaatatgcaaagaggttgaacagagaagcgcaggaacatcttcaggggtttgattctgacaaggtggttcctttgttgtctctcgctgattatattgtcaagagacaaaactga

SEQ ID NO: 6418 - protein, 336 aa, Arabidopsis thaliana
MRPRYSLILSAMRLIRPSNRRLSSIASSDSEFISYMKNKAKSINKALDNSIPLCNNFVPLWEPVLEVHKAMRYTLLPGGKRVRPMLCLVACELVGGQESTAMPAACAVEMIHAASLILDDLPCMDDDSLRRGKPTNHKVFGEKTSILASNALRSLAVKQTLASTSLGVTSERVLRAVQEMARAVGTEGLVAGQAADLAGERMSFKNEDDELRYLELMHVHKTAVLVEAAAVVGAIMGGGSDEEIERLKSYARCVGLMFQVMDDVLDETKSSEELGKTAGKDLITGKLTYPKVMGVDNAREYAKRLNREAQEHLQGFDSDKVVPLLSLADYIVKRQN

SEQ ID NO: 6419 - DNA, 1428 bp, Capsicum annuum
  CDS (149)..(1258)
agagaataggaaacaatatcatgacagtccaacatctcgactccatataaaatagtccactcaacactactttatatacatcttcccatattctaatatttttaagcttactttctccaagtgaaattgcaccacaaatctcaaaaaaatgagatctatgaaccttgttgatttatgggctcaacaagcttgtttagttttcaatcaaactttgtcttataaatccttcaatggattcatgaaaatccctttgaaaaattccaaaattaatcctaagttaaataagaaaagaccattttctcctctaacagtttcagcaattgctactaccaaagaagatgaaagaattgaagcagcacagacggaggaaccattcaatttcaagatttacgtaacggaaaaggctatttctgtaaacaaggcattagatgaggctattattgtaaaagaaccccatgttatccatgaagcaatgcgttattcccttctcgccggcggcaaacgggtccggccaatgctttgtctggccgcctgtgaactcgtcggcggcaaccaggaaaacgccatggccgccgcttgcgccgtcgagatgatccacactatgtcactcattcacgatgatttaccttgtatggacaacgacgacctccgccgcggaaaacctaccaaccacaaaatctacggcgaggacgtcgccgtcctcgcgggagactccctcctcgccttcgccttcgaacacattgtcaactccacggccggagtcaccccgtccagaatcgtaggcgctgttgcggagttagctaagtccatcggaaccgaaggactggtcgccggacaagtagcagacataaaatgcaccggcaacgctagcgtctctctagaaacgctggaattcatccacgtacacaaaacggcagctctcctagaatcctccgtcgtactcggcgcaatactcggcggcggcacgaatgtcgaggtggagaagctacggaggtttgccagatgcatcggattactatttcaagtagttgatgacatacttgacgtgacgaagtcgtcagaggagctcggaaaaactgctgggaaagatttggttgtcgataagacgacgtatccaaaattgttgggattagaaaaggctaaggaatttgcggcggagcttaatcgggaagcgaagcaacagctggaagggtttgattcgcgcaaagctgctccgttgattgcattggctgattatattgcttatcgtgataattaggaaatagtaatattatggaatgaatgtgctaattcttcatttgatttaccaaatggaaatgaaggtgatcgatctattaatgaatcaattgcttatcttgttgatacaaattggagtcttaaattcgtaattatatattacgactttcagtgtgcttatgttggtaatat

SEQ ID NO: 6420 - protein, 369 aa, Capsicum annuum
MRSMNLVDLWAQQACLVFNQTLSYKSFNGFMKIPLKNSKINPKLNKKRPFSPLTVSAIATTKEDERIEAAQTEEPFNFKIYVTEKAISVNKALDEAIIVKEPHVIHEAMRYSLLAGGKRVRPMLCLAACELVGGNQENAMAAACAVEMIHTMSLIHDDLPCMDNDDLRRGKPTNHKIYGEDVAVLAGDSLLAFAFEHIVNSTAGVTPSRIVGAVAELAKSIGTEGLVAGQVADIKCTGNASVSLETLEFIHVHKTAALLESSVVLGAILGGGTNVEVEKLRRFARCIGLLFQVVDDILDVTKSSEELGKTAGKDLVVDKTTYPKLLGLEKAKEFAAELNREAKQQLEGFDSRKAAPLIALADYIAYRDN

SEQ ID NO: 6421 - DNA, 1271 bp, Catharanthus roseus
  CDS (68)..(1141)
gaattcaattacaacatgggttccagcccaatcaatttattgtttggagaatggcagatccagttctatgcgctctaatctttgtcaccctctcaaaaatcaacttcccatttctttttttctttcgggcacaatccgaaagcccattttcagttgttctcgtctctcaatttctgccattataacgaaagaacaaacccaagaagagagcgaaagcaaaagcaagaaagaggtagccttttcttcctcatcttcatttgatttcaaggcatatatgattggaaaggccaattctgttaataaggcattggaagatgcagtcttggttagggaacctttgaaaattcatgaatctatgaggtactcacttctagctggtggtaaaagagttcgtcctatgctctgtattgctgcttgtgaactttttggtggaacagaatctgttgccatgccttctgcttgtgctgttgagatgattcatactatgtctctgatgcacgatgaccttccctgtatggataatgatgatttgagaagagggaagccgacaaatcataaggtttttggggaggatgttgctgttttagctggggatgcccttcttgcatttgcctttgaacatatagcaactgctaccaaaggtgtctcttccgaaagaattgtgagagtagttggggaattggctaagtgtattggttcagaagggctggtggctggacaggttgttgatgtgtgctctgagggcattgctgatgtagggcttgagcatttagagttcatccatattcacaagactgcagctttattagaagggtctgtggttttaggggcaattgtgggtggtgctaatgatgaacaaatttccaaattgaggaaatttgctaggtgtattgggttgttgtttcaggttgtagatgatattcttgatgttactaaatcttctcaagaattaggaaaaactgcagggaaagacttggtggcagataaggtcacttatcctaaacttcttggtattgataagtccagagaatttgctgagaagttgaatagagaagctcaagaacaacttgctgagtttgatcctgaaaaggctgctccattaattgctctagcaaattacatagcctacagagataactaataatatgttgtttaagttataagagaatttcacatttaagatagactataccaatagaattagatattgttgtcacacaagatatgagctggtaattctttcacattgttaatggaaatgatccgaattc

SEQ ID NO: 6422 - protein, 357 aa, Catharanthus roseus
MRSNLCHPLKNQLPISFFLSGTIRKPIFSCSRLSISAIITKEQTQEESESKSKKEVAFSSSSSFDFKAYMIGKANSVNKALEDAVLVREPLKIHESMRYSLLAGGKRVRPMLCIAACELFGGTESVAMPSACAVEMIHTMSLMHDDLPCMDNDDLRRGKPTNHKVFGEDVAVLAGDALLAFAFEHIATATKGVSSERIVRVVGELAKCIGSEGLVAGQVVDVCSEGIADVGLEHLEFIHIHKTAALLEGSVVLGAIVGGANDEQISKLRKFARCIGLLFQVVDDILDVTKSSQELGKTAGKDLVADKVTYPKLLGIDKSREFAEKLNREAQEQLAEFDPEKAAPLIALANYIAYRDN

SEQ ID NO: 6423 - DNA, 1450 bp, Hevea brasiliensis
  CDS (140)..(1252)
cggcacgaggttcattctctctcttgaaggtcatcctccatttctcctcctccgcattcaactatggctgaagcctgaggactaatccataatctctcatttctttcagctttctttctgtcctttcgttaatctcaagatgagttcagtgaatttgggctcatgggttcacacctcctacgtcttaaaccaagctaccagatccagatccaaatccaaatccttctctctacctttcaatcctctaaaaagtttagcaatttcctttgcttatagaaaatcagagcgacccatttcatctgtctctgcgattattaccaaggaagaagaaactcttcaagaagagcagaataatccaccaccctcttttgatttcaaatcctacatgctccaaaaaggcaattccattaaccaagctttagaagctgccattccactccaagaacccgctaaaattcacgagtctatgcgttattccctcttggccggcggcaagagggtacgaccggccctctgcctcgctgcgtgtgagcttgttggtgggaatgactccatggcgatgcctgctgcatgcgctgtggaaatgattcatactatgtctcttatccatgatgacctcccttgcatggataacgacgatctccgccgtggcaagcccaccaatcacatcgtgtttggagaggacgtggcggttctcgccggtgacgcactcctagcatttgcttttgaacacatcgctgtttctactttaaatgtttcttctgctagaattgtccgggcagttggggaattagcgaaggcgatcggggcagaagggttagttgctggccaagtagttgatataaattctgagggctcatctgaggtggatttagagaagcttgaatttattcacatccacaagaccgctaagttgttggagggggctgtggtgctaggggctatattgggcggaggaaccgatgaggaagtggagaaattgaggaaatatgctagggatattgggttgttgttccaagttgttgacgatattcttgatgtgactaaatcatcccaagaattggggaaaactgcaggcaaggacttggtggcggacaaggttacatatcccaagcttttggggattgagaagtcgagggaatttgcagagaagctgaataaggaagctcaggagcagctggctggatttgatcctgaaaaggcagctccattgattgctttggctaattacatcgctcacaggcaaaactaatgcattgttttatcaattgtttgttttgtatgttcacatgaaaaatttggactgctctttatatagctttaaagaagcttagctctgtatcaattctagcaaatacaattcaatagcaatttgtccacttattttacatctctttgaccatgcgcaattgctgatctcgaattttgaatttaaaaaaaaaaaaaaaaa

SEQ ID NO: 6424 - protein, 370 aa, Hevea brasiliensis
MSSVNLGSWVHTSYVLNQATRSRSKSKSFSLPFNPLKSLAISFAYRKSERPISSVSAIITKEEETLQEEQNNPPPSFDFKSYMLQKGNSINQALEAAIPLQEPAKIHESMRYSLLAGGKRVRPALCLAACELVGGNDSMAMPAACAVEMIHTMSLIHDDLPCMDNDDLRRGKPTNHIVFGEDVAVLAGDALLAFAFEHIAVSTLNVSSARIVRAVGELAKAIGAEGLVAGQVVDINSEGSSEVDLEKLEFIHIHKTAKLLEGAVVLGAILGGGTDEEVEKLRKYARDIGLLFQVVDDILDVTKSSQELGKTAGKDLVADKVTYPKLLGIEKSREFAEKLNKEAQEQLAGFDPEKAAPLIALANYIAHRQN

SEQ ID NO: 6425 - DNA, 1101 bp, Sinapis alba
  CDS (1)..(1101)
atggcttcttcagtgactcctctaggttcatgggttcttcttcaccatcatccttcaactatcttaacccaatccagatccagatctcctccttctctcatcacccttaaacccatctccctcactccaaaacgcaccgtttcgtcttcttcctcctcttccctcatcaccaaagaagacaacaacctcaaatcctcttcctcttccttcgatttcatgtcttacatcatccgcaaagccgactccgtcaacaaagccttagactccgccgtccctctccgggagccactcaagatccacgaagcgatgcgttactctctcctcgccggaggaaaacgcgtcagaccagttctctgcatcgccgcgtgcgagctagtcggaggagaagagtctttagctatgccggcgcgttgcgccgtggaaatgatccacaccatgtcgttgatccacgacgacttgccttgtatggataacgacgatctccgccgcggaaagcccacgaatcacaaagtttacggcgaagacgtggcggttttagccggagacgcgcttctttcgttcgccttcgagcatttagcgtcggctacgagctcggaggtttctccggcgagagtggttagagctgtgggagagttggctaaagccatcggcaccgaagggctcgtggcgggacaagtggtggatataagcagtgaagggttggacttaaacaacgtcggattggagcatttgaagtttatacatttgcataaaacggcggcgttgcttgaagcttcagcggttttgggtgggatcatcggtggagggagtgatgaagagatcgagaggctgaggaagttcgcgaggtgtattgggttgttgtttcaggtggttgatgatatcttggacgtgacgaaatcgtctcaagaactggggaaaaccgctgggaaagatttgattgctgataagttgacttatccgaagctcatgggtttggagaaatcgagagagttcgctgagaagttgaatacagaggcacgtgatcagcttttagggtttgattccgacaaggttgctcctttgttggctttggctaattacattgccaatagacagaactga

SEQ ID NO: 6426 - protein, 366 aa, Sinapis alba
MASSVTPLGSWVLLHHHPSTILTQSRSRSPPSLITLKPISLTPKRTVSSSSSSSLITKEDNNLKSSSSSFDFMSYIIRKADSVNKALDSAVPLREPLKIHEAMRYSLLAGGKRVRPVLCIAACELVGGEESLAMPARCAVEMIHTMSLIHDDLPCMDNDDLRRGKPTNHKVYGEDVAVLAGDALLSFAFEHLASATSSEVSPARVVRAVGELAKAIGTEGLVAGQVVDISSEGLDLNNVGLEHLKFIHLHKTAALLEASAVLGGIIGGGSDEEIERLRKFARCIGLLFQVVDDILDVTKSSQELGKTAGKDLIADKLTYPKLMGLEKSREFAEKLNTEARDQLLGFDSDKVAPLLALANYIANRQN

SEQ ID NO: 6427 - DNA, 981 bp, Arabidopsis thaliana
  CDS (1)..(981)
atgttgtttagtggttcagcgatcccattaagcagcttctgctctcttccggagaaaccccacactcttcctatgaaactctctcccgctgcaatccgatcttcatcctcatctgccccggggtcgttgaacttcgatctgaggacgtattggacgactctgatcaccgagatcaaccagaagctggatgaggccataccggtcaagcaccctgcggggatctacgaggctatgagatactctgtactcgcacaaggcgccaagcgtgcccctcctgtgatgtgtgtggcggcctgcgagctcttcggtggcgatcgcctcgccgctttccccaccgcctgtgccctagaaatggtgcacgcggcttcgttgatacacgacgacctcccctgtatggacgacgatcctgtgcgcagaggaaagccatctaaccacactgtctacggctctggcatggccattctcgccggtgacgccctcttcccactcgccttccagcacattgtctcccacacgcctcctgaccttgttccccgagccaccatcctcagactcatcactgagattgcccgcactgtcggctccactggtatggctgcaggccagtacgtcgaccttgaaggaggtccctttcctctttcctttgttcaggagaagaaattcggagccatgggtgaatgctctgccgtgtgcggtggcctattgggcggtgccactgaggatgagctccagagtctccgaaggtacgggagagccgtcgggatgctgtatcaggtggtcgatgacatcaccgaggacaagaagaagagctatgatggtggagcagagaagggaatgatggaaatggcggaagagctcaaggagaaggcgaagaaggagcttcaagtgtttgacaacaagtatggaggaggagacacacttgttcctctctacaccttcgttgactacgctgctcatcgacattttcttcttcccctctga

SEQ ID NO: 6428 - protein, 326 aa, Arabidopsis thaliana
MLFSGSAIPLSSFCSLPEKPHTLPMKLSPAAIRSSSSSAPGSLNFDLRTYWTTLITEINQKLDEAIPVKHPAGIYEAMRYSVLAQGAKRAPPVMCVAACELFGGDRLAAFPTACALEMVHAASLIHDDLPCMDDDPVRRGKPSNHTVYGSGMAILAGDALFPLAFQHIVSHTPPDLVPRATILRLITEIARTVGSTGMAAGQYVDLEGGPFPLSFVQEKKFGAMGECSAVCGGLLGGATEDELQSLRRYGRAVGMLYQVVDDITEDKKKSYDGGAEKGMMEMAEELKEKAKKELQVFDNKYGGGDTLVPLYTFVDYAAHRHFLLPL

SEQ ID NO: 6429 - DNA, 1047 bp, Bacillus subtilis
  CDS (1)..(1047): transl_table=11
atgttaaatatcattcgtttactggcggagtcgctgccacgcatatcggatggaaatgaaaacacagatgtttgggtgaatgatatgaaatttaaaatggcctactcttttttaaatgacgatattgatgtaatcgaaagagaacttgaacaaaccgtacgttccgattacccgcttttaagcgaggcaggtcttcacctgctgcaggccggagggaaacgtattcggcctgttttcgtgctgctttctggcatgtttggcgattatgatattaataagattaaatatgtcgccgtcactctggaaatgattcacatggcatctttggttcatgatgatgtcattgatgatgcagagcttcgccgaggaaaaccgacaatcaaagcaaagtgggacaatcgtattgcgatgtacacaggcgattatatgcttgcgggatctcttgaaatgatgacgagaattaacgaaccgaaagcccataggattttgtcacagacgatcgttgaagtttgtctaggggaaattgagcagatcaaagacaaatacaacatggaacaaaatctcagaacgtatctccgccgtatcaaaagaaaaacagctctcttgatcgcggtcagctgccagcttggtgccattgcgtctggagctgatgagaagattcataaggcattgtactggtttgggtattacgtcggcatgtcttatcagattattgatgatattcttgattttacttcaactgaggaagagctgggtaaacccgtaggaggagatttgcttcaaggaaacgtcacattgccagtgctgtatgccctgaaaaatcctgcattaaaaaaccagcttaaattgattaacagtgagacaacgcaggaacagcttgaaccaatcattgaagaaatcaaaaaaacagatgcaattgaagcatctatggcagtaagcgaaatgtatctgcagaaagcttttcagaaattaaacacgcttcctcgagggcgcgcacgctcgtctcttgcagccatcgcaaaatatatcggtaaaagaaaattttaa

SEQ ID NO: 6430 - protein, 348 aa, Bacillus subtilis
MLNIIRLLAESLPRISDGNENTDVWVNDMKFKMAYSFLNDDIDVIERELEQTVRSDYPLLSEAGLHLLQAGGKRIRPVFVLLSGMFGDYDINKIKYVAVTLEMIHMASLVHDDVIDDAELRRGKPTIKAKWDNRIAMYTGDYMLAGSLEMMTRINEPKAHRILSQTIVEVCLGEIEQIKDKYNMEQNLRTYLRRIKRKTALLIAVSCQLGAIASGADEKIHKALYWFGYYVGMSYQIIDDILDFTSTEEELGKPVGGDLLQGNVTLPVLYALKNPALKNQLKLINSETTQEQLEPIIEEIKKTDAIEASMAVSEMYLQKAFQKLNTLPRGRARSSLAAIAKYIGKRKF

SEQ ID NO: 6431 - DNA, 789 bp, Aquifex aeolicus
  CDS (1)..(789): transl_table=11
atggaaaggatagaaacctggaaagaaaaaatagaaaaaagacttaatgaaatcctgaaacccgaaggtccagaagaattaatagaagctatgaagtactatcccttacaaaagggaaagaggataagacccctctttacggttgcggtcgcaagtgctctcggagggaatgaagatgatgctataaccgttggctctggtatagaactcattcacaactactcccttatacacgacgatcttccctgtatggacaacgatgtctggagaagaggcctccctacgtgccacataaagttcggagaagcgatggcactccttgcgggagatgcactcctgacttacacctttgaggtcctatcacaaagggaaaattacaaaaccctttcctgtgaagagatacttgagataaacaaaattatcgctcaaaaggcaggttctaacggaatggtagggggacaggttcttgacataaaggggtatgaggacctctacgaggtcagtgtaaaaaaaacaggggcactctttgaagcttgctttatgtgcggagctgtggtagcgaagagaagggaaaaactcaaggagatggaaagtattggcagaaaagtaggcttactctttcaaatggttgacgactaccttgacaaagatggattttacgagaaactcggagaatgtttaaaagaagaaataaaaaaactatacgaagaactaaaagaaaaagaaattttcaaggaaagccaagaactcagataccttctagaccttatatacaagaggattacctga

SEQ ID NO: 6432 - protein, 262 aa, Aquifex aeolicus
MERIETWKEKIEKRLNEILKPEGPEELIEAMKYYPLQKGKRIRPLFTVAVASALGGNEDDAITVGSGIELIHNYSLIHDDLPCMDNDVWRRGLPTCHIKFGEAMALLAGDALLTYTFEVLSQRENYKTLSCEEILEINKIIAQKAGSNGMVGGQVLDIKGYEDLYEVSVKKTGALFEACFMCGAVVAKRREKLKEMESIGRKVGLLFQMVDDYLDKDGFYEKLGECLKEEIKKLYEELKEKEIFKESQELRYLLDLIYKRIT

SEQ ID NO: 6433 - DNA, 894 bp, Bacillus stearothermophilus
  CDS (1)..(894): transl_table=11
atggcgcagctttcagttgaacagtttctcaacgagcaaaaacaggcggtggaaacagcgctctcccgttatatagagcgcttagaagggccggcgaagctgaaaaaggcgatggcgtactcattggaggccggcggcaaacgaatccgtccgttgctgcttctgtccaccgttcgggcgctcggcaaagacccggcggtcggattgcccgtcgcctgcgcgattgaaatgatccatacgtactctttgatccatgatgatttgccgagcatggacaacgatgatttgcggcgcggcaagccgacgaaccataaagtgttcggcgaggcgatggccatcttggcgggggacgggttgttgacgtacgcgtttcaattgatcaccgaaatcgacgatgagcgcatccctccttccgtccggcttcggctcatcgaacggctggcgaaagcggccggtccggaagggatggtcgccggtcaggcagccgatatggaaggagaggggaaaacgctgacgctttcggagctcgaatacattcatcggcataaaaccgggaaaatgctgcaatacagcgtgcacgccggcgccttgatcggcggcgctgatgcccggcaaacgcgggagcttgacgaattcgccgcccatctaggccttgcctttcaaattcgcgatgatattctcgatattgaaggggcagaagaaaaaatcggcaagccggtcggcagcgaccaaagcaacaacaaagcgacgtatccagcgttgctgtcgcttgccggcgcgaaggaaaagttggcgttccatatcgaggcggcgcagcgccatttacggaacgccgacgttgacggcgccgcgctcgcctatatttgcgaactggtcgccgcccgcgaccattaa

SEQ ID NO: 6434 - protein, 297 aa, Bacillus stearothermophilus [sequence omitted]

SEQ ID NO: 6435 - DNA, 819 bp, Bacillus subtilis
  CDS (1)..(819): transl_table=11
gtgacaaataaattaacgagctttctggcggaccggaaaaaaacaattgaaaatcagctttctgtctatacagaaaagcttgatatgccggactcattaaagaaatctatgctatattctctacaggccggcggaaagcggttgcggcctctgattgtactggctgttttaaatgcatatggaaaaagcgaaaaagacggcattccggtgggctgtgctgtcgaaatgattcacacgtattcgttaattcatgatgatcttccatgcatggatgatgacgatttgcgccgcgggaagccgacaaaccataaagtgtttggtgaagcgacggcagtattagcgggtgacgggctgctcacagaaagctttaagctgattacctcccacgtgtcagacgaggtgtcagcagaaaagcgcctgcggcttgtgaatgaactgatttcagcggcaggcaccgaaggcatggtcggtgggcaagtagctgatatggaagcgggaaaccgacaagtcacgcttgaagagctcgaatccattcatgaacggaaaacttccaagctccttggcttttgtgtaatcgccggtgctattttggctgatgcgcctgaggaagacattgaaacactgcgtaccttcagcagccacattggaatcggatttcaaatcagagacgatattttagatttagaaggcagtgaagagaaaatcggcaaacgtgtcggctcggataccacaaatgacaaatcgacatacccgtcgcttctttcattggaaggggccaaacataaattggatgttcatataaaagaggcgaacgattga

SEQ ID NO: 6436 - protein, 272 aa, Bacillus subtilis
MTNKLTSFLADRKKTIENQLSVYTEKLDMPDSLKKSMLYSLQAGGKRLRPLIVLAVLNAYGKSEKDGIPVGCAVEMIHTYSLIHDDLPCMDDDDLRRGKPTNHKVFGEATAVLAGDGLLTESFKLITSHVSDEVSAEKRLRLVNELISAAGTEGMVGGQVADMEAGNRQVTLEELESIHERKTSKLLGFCVIAGAILADAPEEDIETLRTFSSHIGIGFQIRDDILDLEGSEEKIGKRVGSDTTNDKSTYPSLLSLEGAKHKLDVHIKEAND

SEQ ID NO: 6437 - DNA, 999 bp, Bradyrhizobium japonicum
  CDS (1)..(999): transl_table=11
atgcagactggttccacgccacacgacgaccgagctggcgtttccgcgaacggcatattgggcgcgcaggcgcgcggcgcatccggcaggctgctgcccgagatctggatgcaggacggcgcaaagcgggtcgaagaggcgctggcgcgtcttctctgcgccgaagacgacggtgagaccgagctgatggcggcgatgcgctacgccaccttgcatggcggcaagcgcacccgcgccttgctctgtttggctgccggcgcactggccgacacgccggcgcacatgctcgatgacgtcggtgccgccatcgagatgatgcacgcctgtacgttggtccacgacgatctgcccgcgatggacgacgacgtgcttcgccgcggccttccgaccgtgcacgtcaagttcggcgaagccaccgcgatcctggtcggcgatgcgctgcaggcgcacgccttcctgaccctggcgagcctgaatgcgccgggcgacagccctatcgcgctcgtgcgcgaactggcgcaggcggtgtccgccgagggggccgcaggcgggcaggccatagatctgtcgctggttggaaagcacgtcgagctggacaggatcgtggcgatgcaccggatgaagagcggagcgctagtgcgcgcgtccgttcgcatgggcgcgctatgcgctgtcggcgtgaatgccgcgcacgctgcactttactgtgcgctggatcactacagcgcctgtttcggcctggcgttacaggtgatcgacgacattctcgacgtgacagcggataccgcggcgctgggcaagacccccggcaaggacgcggcggcgcagaagccgacctgcgcgtcgatcatgggactgcaggaagcacgccagttcgcgctggatctgttgcgcgatgccggcgaggccatcgcgccgctggggccgcgtgcggaacggttggcgcaactcatacagcgggccaacgcgtatctgttcaaacacgcgccacgcgcatga

SEQ ID NO: 6438 - protein, 332 aa, Bradyrhizobium japonicum
MQTGSTPHDDRAGVSANGILGAQARGASGRLLPEIWMQDGAKRVEEALARLLCAEDDGETELMAAMRYATLHGGKRTRALLCLAAGALADTPAHMLDDVGAAIEMMHACTLVHDDLPAMDDDVLRRGLPTVHVKFGEATAILVGDALQAHAFLTLASLNAPGDSPIALVRELAQAVSAEGAAGGQAIDLSLVGKHVELDRIVAMHRMKSGALVRASVRMGALCAVGVNAAHAALYCALDHYSACFGLALQVIDDILDVTADTAALGKTPGKDAAAQKPTCASIMGLQEARQFALDLLRDAGEAIAPLGPRAERLAQLIQRANAYLFKHAPRA

SEQ ID NO: 6439 - DNA, 885 bp, Buchnera aphidicola subsp
  CDS (1)..(885): transl_table=11
atgaatttttctcatttatatgacatctactataatcgtataaataaaaagttgttcgaaataatacaagaattgccctttcaggattctgttctttttagagcaatgaaatacagtaccttatcaggaggaaaaagattacgtgcatgtttaatatatgctactggagaaacatttcaagtcaatattgctgcacttgatgttatatctgctgctgttgaattagttcattcgtattctttaattcatgatgatttgccatgtattgataacgattattttagaagagggaaaatttcttgtcatataaagtatggtgaaaattttgctttattggcaggtgatgcattacaaggattggcatttaatattttatcaaatagtaatatgccaggagtacacgattctattcgtttaaaaatgattgctgagttttctaatgcaattggttattctgggatgtgtattggtcaaatgctagatttagaaaaagaaagaaaaaaaataaatatatctgaattagaaaagattaatttatataaaactgcatttttaattcggtgctctatacgtttagcttattttgcttctaacaatttttctaaagaagttttatttattttagataaattttcagtttctattggtttggcttttcaaattcaagatgatatcttggatttaaaaaatgatatcaaaaagttagagagtaaaagaaataaaacaaaaaatacatatccattattaataggattaaaaaaatctaaaattaaaataaaagaattatataaagaagctttttttacattagaaattttaaaaaaaaattttaatgttaatatattaaaattactgacacagtttataatgaaacgttttaaataa

SEQ ID NO: 6440 - protein, 294 aa, Buchnera aphidicola subsp
MNFSHLYDIYYNRINKKLFEIIQELPFQDSVLFRAMKYSTLSGGKRLRACLIYATGETFQVNIAALDVISAAVELVHSYSLIHDDLPCIDNDYFRRGKISCHIKYGENFALLAGDALQGLAFNILSNSNMPGVHDSIRLKMIAEFSNAIGYSGMCIGQMLDLEKERKKINISELEKINLYKTAFLIRCSIRLAYFASNNFSKEVLFILDKFSVSIGLAFQIQDDILDLKNDIKKLESKRNKTKNTYPLLIGLKKSKIKIKELYKEAFFTLEILKKNFNVNILKLLTQFIMKRFK

SEQ ID NO: 6441 - DNA, 900 bp, Escherichia coli
  CDS (1)..(900): transl_table=11
atggactttccgcagcaactcgaagcctgcgttaagcaggccaaccaggcgctgagccgttttatcgccccactgccctttcagaacactcccgtggtcgaaaccatgcagtatggcgcattattaggtggtaagcgcctgcgacctttcctggtttatgccaccggtcatatgttcggcgttagcacaaacacgctggacgcacccgctgccgccgttgagtgtatccacgcttactcattaattcatgatgatttaccggcaatggatgatgacgatctgcgtcgcggtttgccaacctgccatgtgaagtttggcgaagcaaacgcgattctcgctggcgacgctttacaaacgctggcgttctcgattttaagcgatgccgatatgccggaagtgtcggaccgcgacagaatttcgatgatttctgaactggcgagcgccagtggtattgccggaatgtgcggtggtcaggcattagatttagacgcggaaggcaaacacgtacctctggacgcgcttgagcgtattcatcgtcataaaaccggcgcattgattcgcgccgccgttcgccttggtgcattaagcgccggagataaaggacgtcgtgctctgccggtactcgacaagtatgcagagagcatcggccttgccttccaggttcaggatgacatcctggatgtggtgggagatactgcaacgttgggaaaacgccagggtgccgaccagcaacttggtaaaagtacctaccctgcacttctgggtcttgagcaagcccggaagaaagcccgggatctgatcgacgatgcccgtcagtcgctgaaacaactggctgaacagtcactcgatacctcggcactggaagcgctagcggactacatcatccagcgtaataaataa

SEQ ID NO: 6442 - protein, 299 aa, Escherichia coli
MDFPQQLEACVKQANQALSRFIAPLPFQNTPVVETMQYGALLGGKRLRPFLVYATGHMFGVSTNTLDAPAAAVECIHAYSLIHDDLPAMDDDDLRRGLPTCHVKFGEANAILAGDALQTLAFSILSDADMPEVSDRDRISMISELASASGIAGMCGGQALDLDAEGKHVPLDALERIHRHKTGALIRAAVRLGALSAGDKGRRALPVLDKYAESIGLAFQVQDDILDVVGDTATLGKRQGADQQLGKSTYPALLGLEQARKKARDLIDDARQSLKQLAEQSLDTSALEALADYIIQRNK

SEQ ID NO: 6443 - DNA, 1080 bp, Micrococcus luteus
  CDS (105)..(980): transl_table=11
agtgagtttagagaaatccattgaattgtatgagcaaggtgtcaaattatctcaagcatgtcaattaaagctatctgaagcagaagaaaagattgcaaaattaaatgctgcaggagaaactgacaatgaatcgtgactttcttaatctgattaatgaatcattgttaaataaatatcatcctgcgcaatcaagactacatgaagcaatcaactattcattaagtgcaggtggcaagcgcattagaccattacttgttctgactactttagatagtttaggtggcaatgcacatgacggtttaccatttggcattgcgcttgaaatgattcatacgtattctttaattcacgatgacttgccggcaatggataatgatgactatcgtcgcggtaaactcacgaatcataagcgttttgatgaagcaacagctatactcgctggagatgcattgctcactgatgcttttcaatgcattttaaatacgcagttaaacgcagaaattaaattatcattgattaatttattaagtactgcttctggatctaatggcatggtttacggccaaatgctcgatatgcaaggtgaacataaaacattgacattaaatgaactggaacgtattcacatacataaaaccggtgaattgattcgtgcagcaattgtaagtgcaggtatcataatgaattttaatgatgcacaaattgagcaactcaatattattggtaagaacgtaggtttaatgttccagataaaagatgatattcttgatgttgaagggtcgttcgaaaatatcggaaaaacagttggcagtgatttaaataatgataaaagtacatatgtatcactcttaggacttgaagcttcaaagcaattacttaatgataagctaactgaaacatatgatgcgcttaaaacgttacaaccgattaatgacaatctgaaaacattaattacttatatcgttgaaagaaataaataatataagcaatcaataaaagctttgatttttacttttattgattgcttttgtttattaattcttgacttgtgattattatttttcatgtgttacgaaagcg

SEQ ID NO: 6444 - protein, 291 aa, Micrococcus luteus
MLQEKLTMNRDFLNLINESLLNKYHPAQSRLHEAINYSLSAGGKRIRPLLVLTTLDSLGGNAHDGLPFGIALEMIHTYSLIHDDLPAMDNDDYRRGKLTNHKRFDEATAILAGDALLTDAFQCILNTQLNAEIKLSLINLLSTASGSNGMVYGQMLDMQGEHKTLTLNELERIHIHKTGELIRAAIVSAGIIMNFNDAQIEQLNIIGKNVGLMFQIKDDILDVEGSFENIGKTVGSDLNNDKSTYVSLLGLEASKQLLNDKLTETYDALKTLQPINDNLKTLITYIVERNK

SEQ ID NO: 6445 - DNA, 945 bp, Oryza sativa
  CDS (1)..(945)
atggtcacgccggagctgaacggcggcgacgtcggcgtcggcgtcggcggtggtagcttcgactttcagcggtatctgtctgccagggccgacgccgtgcacgacgcgctggaccgggccatgccgcgcggcttcccggagcggctctgcgagtccatgcgctactccgtcctcgccggcggcaagcgggtgcgccccgtgctcgcgctggccgcgtgcgagctcgtcggcggggacgccgcggcggccacgcccgtcgcctgcgcggtcgagatgatccacaccatgtcgctcatccacgacgacatgccgtgcatggacgacgacgccctccgccggggccgcccctccaaccacgtcgccttcggcgagttcaccgccctcctcgccggcgacgcgctccacgccctcgcgttcgagcacgtggcgcgcggctgcggcgaccacggcgtccccgcggaccgcacgctccgggcggtcgccgagctcgggagcgcctcgggcaccggcggggtcgccgccgggcaggtcgccgacaaggagagcgagggcctccccgtcagcctcgccatgctggagtacatccacgtgcacaagacggcgaggctcctcgaggccgccgccgtgtccggcgccatcgtcggcgggggcgcggacgccgaggtggagagggtccggcggtacgcgcgctgcgtcgggctcctcttccaggtggtcgacgacgtgctcgacatgacgagcacatcggagcagctcgggaagacggccgggaaggacgtcgaggccgacaaggccacttacccgaagctgctcggcgtcgacaaggcccgcgagtacgccgccgacctcctcgccatggccgaggcggagctcgacgggttcgacgccgagcgcgccgcgccgctgcgacacctcgcgcggttcatcgcctacaggcagcattaa

SEQ ID NO: 6446 - protein, 314 aa, Oryza sativa
MVTPELNGGDVGVGVGGGSFDFQRYLSARADAVHDALDRAMPRGFPERLCESMRYSVLAGGKRVRPVLALAACELVGGDAAAATPVACAVEMIHTMSLIHDDMPCMDDDALRRGRPSNHVAFGEFTALLAGDALHALAFEHVARGCGDHGVPADRTLRAVAELGSASGTGGVAAGQVADKESEGLPVSLAMLEYIHVHKTARLLEAAAVSGAIVGGGADAEVERVRRYARCVGLLFQVVDDVLDMTSTSEQLGKTAGKDVEADKATYPKLLGVDKAREYAADLLAMAEAELDGFDAERAAPLRHLARFIAYRQH

SEQ ID NO: 6447 - DNA, 969 bp, Brassica napus
  CDS (1)..(969)
atgctgttaagcgcttcagcgactcctctccgattttgtgggtttgttcccgagaaaccctgtcgtggtgtgcgcatgaaacaatcaattcggtcatcatcgtccaataacttcgatctgaggacgtattggacaaccctaataacggagatcaaccagaagctggacgaagcgataccagtcaagtaccctgcagggatctatgaggcgatgagatactcagtcctcgctaaaggcgccaagcgtgcccctcctgtaatgtgcgtggccgcctgcgagctcttcggtggcgatcgactcgccgctttccccaccgcatgtgcccttgaaatggtccacgcggcttcgctgattcacgatgacctcccctgtatggacgatgatcctgtccgcagaggaaagccatctaaccacactgtcttcggcgctgacatggccattctggctggtgatgccctcttcccactcggcttccagcacattgtctctctcacccctcctcaccttgttccccgatccaccatcctccgtctcatctccgagattgcccgcaccgtcggctccaccggcatggctgcagggcagtacgttgacctcgaaggaggcccctttcctatttcctttgctcaggagaagaaattcggagccatgggggagtgctcagccgtctgtggaggtctcttgggtggtgccactgacgatgagcttcagagtctcagattgtacggcagagctgttgggatgctgtatcaggtggtggatgacatcagagacgacgacaagacgaagaagaagaagagctatgcgggagtctttggttcagagagggcaatggaaatggcagatgagcttagtgtaaaggccaagaaggagctgcaagtgtttgacaactatggagacgcatcggttgctcctctctacagtttcgttgactacgctgctcaccgagacttccttcttcatgtctga

SEQ ID NO: 6448 - protein, 322 aa, Brassica napus
MLLSASATPLRFCGFVPEKPCRGVRMKQSIRSSSSNNFDLRTYWTTLITEINQKLDEAIPVKYPAGIYEAMRYSVLAKGAKRAPPVMCVAACELFGGDRLAAFPTACALEMVHAASLIHDDLPCMDDDPVRRGKPSNHTVFGADMAILAGDALFPLGFQHIVSLTPPHLVPRSTILRLISEIARTVGSTGMAAGQYVDLEGGPFPISFAQEKKFGAMGECSAVCGGLLGGATDDELQSLRLYGRAVGMLYQVVDDIRDDDKTKKKKSYAGVFGSERAMEMADELSVKAKKELQVFDNYGDASVAPLYSFVDYAAHRDFLLHV

SEQ ID NO: 6449 - DNA, 1281 bp, Glycine max
  CDS (1)..(1281)
atgatgtctgtcacaggcaaaagcattgattttgctggcaaaaacttggtctcttgtggctgctcttccaatgcttcttcgtttgataggtacactgtgaggaactatgccaagctgaatagtaataattctaaagggtgtggcagagatcatggggctcgtaaattggtttgttgtaagaagaggagcactcattgtcgggtttcttctatgaagactgcacagcctacggtgaatggggggactcatgcatttgaaggccttaccacaggattggacttgaagggttattcagaagaccccatttcccctgctaggctttttgaagtggttgccgatgatctgctaactctcaataaaaatcttcagtcgattgtaggagcagaaaatccagttttgatgtctgcagctgagcagatttttagtgctggtggaaagaggatgagaccagctttggtgttcttggtgtcaagggcgactgcagagttacttggcttgaaggaacttactgcaaagcatcgacgtttagcagagataattgaaatgattcatactgcaagtttgatacatgatgatgtactagatgagagtgaccttcgacgagggaagaaaactgttcatcaaatgtttggaacaagagttgcagtgctggctggagacttcatgtttgcacagtcatcatggtatctagccaaccttgaaaatattcaagtcattaaactcatcagtcaggtgataaaagattttgcaagtggggaaataaagcaggcttcaagcttgtttgattgtgatgtacaacttgacgagtatctaattaagagctattacaagacagcatccttgattgctgccagcacaaaaggagccgcgatctttagtggtgctgacagcagcgtgactgagaaaatgtacgaatatggaaggaatcttggtctatccttccaagttgtggatgacatattggatttcactcaatcagccgagcaactgggaaagcctgctggcagtgaccttgccaagggcaacctgactgcaccagtaattttcgcactggagaaagaaccgaaattgagggatatcatcgagtctgaattcagtgaggttggttcccttgaggaagccatcaatttggtcaagagttgtgggggcattgaaagagcacaagagttagcaaaagagaaagccgatcttgcaattcaaagtctccaatgcctacctcagagtgtatttcgtttagcccttgaagatatggtggcatataaccttcaacggattgcataa

SEQ ID NO: 6450 - protein, 426 aa, Glycine max
MMSVTGKSIDFAGKNLVSCGCSSNASSFDRYTVRNYAKLNSNNSKGCGRDHGARKLVCCKKRSTHCRVSSMKTAQPTVNGGTHAFEGLTTGLDLKGYSEDPISPARLFEVVADDLLTLNKNLQSIVGAENPVLMSAAEQIFSAGGKRMRPALVFLVSRATAELLGLKELTAKHRRLAEIIEMIHTASLIHDDVLDESDLRRGKKTVHQMFGTRVAVLAGDFMFAQSSWYLANLENIQVIKLISQVIKDFASGEIKQASSLFDCDVQLDEYLIKSYYKTASLIAASTKGAAIFSGADSSVTEKMYEYGRNLGLSFQVVDDILDFTQSAEQLGKPAGSDLAKGNLTAPVIFALEKEPKLRDIIESEFSEVGSLEEAINLVKSCGGIERAQELAKEKADLAIQSLQCLPQSVFRLALEDMVAYNLQRIA

SEQ ID NO: 6451 - DNA, 1110 bp, Brassica napus
  CDS (1)..(1110)
atggcttcttcagtgactctaggttcatgcccatgggttcttcaccatcatccttcaacccaatccaaaacacccagatctagatctccttctctcatcacccttaaacccatcaccctcaccccaaaacgcaccgtttcgtctgcttcccacaccatctcctcttccctcgtcaccaaagaagacaacaacctcaaatccaccaccacctcctccttcgacttcatgtcgtacatcctccgcaaagccgactccgtcaacagagccctggactccgccgtccccctccgggagccgctcaagatccacgaggcgatgcgctactccctcctcgccggcggcaaacgcgtcaggcccgtcctctgcatcgccgcctgcgagctcgtcggcggcgaagagtccctcgccatgccggcggcctgcgccgtcgagatgatccacaccatgtcgctgatccacgacgacttgccgtgcatggacaacgacgacctccgccgcgggaagccgacgaaccacaaggtttacggcgaggacgtggcggtcctggccggagacgcgcttctctccttcgccttcgagcatttggcgtcggcgacgagctccgacgtttctccggcgagagtggtcagagccgtcggagagttggcgaaagctataggaaccgaagggctggtggcgggacaagtggcggatataagcagcgaagggttagacttaaacgacgtcggattggatcatttagagtttattcatttgcataaaacggcggcgttgcttgaggcttcagccgttttgggcgggatcgtcggtggagggagtgatgaagagatcgagaggctgaggaagttcgcgaggtgtatcggtctgttgtttcaggtggttgatgatatcctggacgtgaccaagtcgtctcaggagctggggaaaaccgccgggaaagatttgatcgctgataagctgacgtatccgaagctcatgggattggagaaatcgagagagttcgctgagaagttgaatagagaggcgcgtgatcagcttttggggtttgattccgacaaggttgctcctttgttggctttggctaattacattgccaatagacagaactga

SEQ ID NO: 6452 - protein, 369 aa, Brassica napus
MASSVTLGSCPWVLHHHPSTQSKTPRSRSPSLITLKPITLTPKRTVSSASHTISSSLVTKEDNNLKSTTTSSFDFMSYILRKADSVNRALDSAVPLREPLKIHEAMRYSLLAGGKRVRPVLCIAACELVGGEESLAMPAACAVEMIHTMSLIHDDLPCMDNDDLRRGKPTNHKVYGEDVAVLAGDALLSFAFEHLASATSSDVSPARVVRAVGELAKAIGTEGLVAGQVADISSEGLDLNDVGLDHLEFIHLHKTAALLEASAVLGGIVGGGSDEEIERLRKFARCIGLLFQVVDDILDVTKSSQELGKTAGKDLIADKLTYPKLMGLEKSREFAEKLNREARDQLLGFDSDKVAPLLALANYIANRQN

SEQ ID NO: 6453 - DNA, 1263 bp, Brassica napus
  CDS (1)..(1263)
atgttaatcacgaggggtatttctcgcaagttccgcaccttctatggctgctctcgatctctcatcgcctctccccgcctcgcaatcatacccaatcggagtcactcctcttgctccgactctacaaaaaacaagggttacgtttgcagagatacttcttatgcattgacttctccgggttttgggagctttagacatcagctctatcaccagagcagctccgttgttgaggaggagcttgaccccttttcccttgatgctgatgagctgtcacttcttagtaataagttgagagccatggtagttgccgaggttcccaagcttgcttctgcggctgaatacttcttcaaaaagggtgtggaaggcaaacagtttcgtccaactattatgctgctgatggcgactgctctgaatgtacgtgtaccagaagcattggctgctgaatcagcagatgtagtctcatcagagttacgtgtaaggcaacggggtattgctgaaatcaccgagatgatacatgttgcaagcctactgcatgatgatgtcttagatgatgctgatacaaggcgtggtgttggttccttaaactttgtaatgggtaacaagatatcggtattagcaggagactttttgctttctcgggcttgtgtggctcttgctgctcttaaaaacacagaggttgtatcgttgcttgcaactgttgtagaacatcttgttaccggtgaaaccatgcaaatgactagcacaactgatcagcgtcatagtatggactactacatgcagaagacatattataagacggcatcactaatctcaaacagctgcaaagcagtggcattactcgctggacaatcagcagaagttgccatgttagcttttgaatacgggaagaatctgggcttggcattccaattgatagacgacgttctcgacttcaccggcacatctgcgtctctaggaaagggatccttatcagacatccgacatgggatcataacagctccaatcctctttgccatggaggagtttccacaactacgcaaagttgttggtcaacttgaaaaagatccaacgaacgttgacattgctttagagtatcttgggaagagcaatgggatacaaaggacaagagacttagctatggaacatgcgaatctcgcagcagcagcaattgggtctctacctgaaacagacgatgaagatgtcaaaagatcgaggcgggcacttattgacttgacacatagagtcatcaccagaaacaagtaa

SEQ ID NO: 6454 - protein, 420 aa, Brassica napus
MLITRGISRKFRTFYGCSRSLIASPRLAIIPNRSHSSCSDSTKNKGYVCRDTSYALTSPGFGSFRHQLYHQSSSVVEEELDPFSLDADELSLLSNKLRAMVVAEVPKLASAAEYFFKKGVEGKQFRPTIMLLMATALNVRVPEALAAESADVVSSELRVRQRGIAEITEMIHVASLLHDDVLDDADTRRGVGSLNFVMGNKISVLAGDFLLSRACVALAALKNTEVVSLLATVVEHLVTGETMQMTSTTDQRHSMDYYMQKTYYKTASLISNSCKAVALLAGQSAEVAMLAFEYGKNLGLAFQLIDDVLDFTGTSASLGKGSLSDIRHGIITAPILFAMEEFPQLRKVVGQLEKDPTNVDIALEYLGKSNGIQRTRDLAMEHANLAAAAIGSLPETDDEDVKRSRRALIDLTHRVITRNK

SEQ ID NO: 6455 - DNA, 966 bp, Brassica napus
  CDS (1)..(966)
atgctattaagcgcttcagcgactcctctccgatttggtgggcatgttcccgagaaaccctgtcgtatgcgcatgaaacaagcaattcgatcatcatcgtccaataacttcgatctgaggacgtattggacaaccctaataacggagatcaaccagaagctggacgaagcgataccagtcaagtaccctgcagggatctatgaggcgatgagatactcagtcctcgctaaaggcgccaagcgtgcccctcctgtaatgtgcgtggccgcctgcgagctcttcggtggcgatcgactcgccgctttccccaccgcatgtgcccttgaaatggtccacgcggcttcgctgattcacgatgacctcccctgtatggacgatgatcctgtccgcagaggaaagccatctaaccacactgtcttcggcgctgacatggccattctggctggtgatgccctcttcccactcggcttccagcacattgtctctctcacccctcctcaccttgttccccgatccaccatcctccgtctcatctccgagattgcccgcaccgtcggctccaccggcatggctgcagggcagtacgttgacctcgaaggaggcccctttcctatttcctttgctcaggagaagaaattcggagccatgggggagtgctcagccgtctgtggaggtctcttgggtggtgccactgacgatgagcttcagagtctcagattgtacggcagagctgttgggatgctgtatcaggtggtggatgacatcagagacgacgacaagacgaagaagaagaagagctatgcgggagtctttggttcagagagggcaatggaaatggcagatgagcttagtgtaaaggccaagaaggagctgcaagtgtttgacaactatggagacgcatcggttgctcctctctacagtttcgttgactacgctgctcaccgagacttccttcttcatgtctga

SEQ ID NO: 6456 - protein, 321 aa, Brassica napus
MLLSASATPLRFGGHVPEKPCRMRMKQAIRSSSSNNFDLRTYWTTLITEINQKLDEAIPVKYPAGIYEAMRYSVLAKGAKRAPPVMCVAACELFGGDRLAAFPTACALEMVHAASLIHDDLPCMDDDPVRRGKPSNHTVFGADMAILAGDALFPLGFQHIVSLTPPHLVPRSTILRLISEIARTVGSTGMAAGQYVDLEGGPFPISFAQEKKFGAMGECSAVCGGLLGGATDDELQSLRLYGRAVGMLYQVVDDIRDDDKTKKKKSYAGVFGSERAMEMADELSVKAKKELQVFDNYGDASVAPLYSFVDYAAHRDFLLHV

SEQ ID NO: 6457 - DNA, 1053 bp, Glycine max
  CDS (1)..(1053)
atgagtgccctcaatttgaacgcatggccacgccccagatccagatccagatcccgatccccaacctttcacgccgtcaataagttacccttcttcaccgttaccaaacggagagcattctcgctctctgcggtgctcacggtcgagacggaagagaagccaccaatcttcgacttcaagaactacatgctttccaaagcgtccgcggtcaacaaggccctcgacgactccgtttcgctccgcgagcccaagaagatccacgaggcgatgcggtactcgctcctcgccggcggcaagcgcgtgcgccctgtgttatgcgtggcggcgtgcgagctcgtcggcgggcacgaggccacggcgatgcccgccgcctgcgccctcgagatgatccacaccatgtcgctcatccacgacgacctcccctgcatggacaacgacgatctccgccgcggcaagcccaccaaccacacggtcttcggcgaggacgtcgccgtcctcgccggcgacgccctcctggccttcgccttcgagcacatcgccgcctccacccggggggcctcggcgccccggatcctccgcgcgatcggcgagctcgcgcggtcgatcggctccgagggcctcgttgccggccaggtcgtcgacatcaactctgagggcctggccgacgttggcctagagcgcctggagttcatccacgtccacaagaccgccgcgctcctcgagggtgcggttgtcctcggcgccatcctcggcggcggcaccgacgacgaggtcgaaaaattgagaaaattcgctcgctacattggtctactctttcaggttgttgatgacattctcgatgttactaagtcttcccaggaattgggaaagaccgctggaaaagaccttgtggctgataaggttacttaccccaagcttttggggattgagaagtctaaggagtttgctgcgaaactgaacaaggatgctcaggatcagcttgctggctttgaccctgttaaggctgctcctttgattgctttagccaattacattgcttataggcagaactag

SEQ ID NO: 6458 - protein, 350 aa, Glycine max
MSALNLNAWPRPRSRSRSRSPTFHAVNKLPFFTVTKRRAFSLSAVLTVETEEKPPIFDFKNYMLSKASAVNKALDDSVSLREPKKIHEAMRYSLLAGGKRVRPVLCVAACELVGGHEATAMPAACALEMIHTMSLIHDDLPCMDNDDLRRGKPTNHTVFGEDVAVLAGDALLAFAFEHIAASTRGASAPRILRAIGELARSIGSEGLVAGQVVDINSEGLADVGLERLEFIHVHKTAALLEGAVVLGAILGGGTDDEVEKLRKFARYIGLLFQVVDDILDVTKSSQELGKTAGKDLVADKVTYPKLLGIEKSKEFAAKLNKDAQDQLAGFDPVKAAPLIALANYIAYRQN

SEQ ID NO: 6459 - DNA, 1287 bp, Zea mays
  CDS (1)..(1287)
atgtcctggcggtggactctcgcgcgccgcgtcgccacgctggccgcgatcggtggcggcggtgcccaggcgcagaggctcctgtccacctcgtcagccggcggtggcactggcctcctgggtcggcactacatacccctcgcctcccagattcggagcaaggtagttggttgcagaggagctgctcttgtgagctccagatggttgcatgaggcccaataccaggttcgccaggacggggcttccagggctcaggaacagcaagatccatttgaattagtcgccgatgagctatcacttcttgcaaataggttacgatccatggtggctgctgaggtccccaaactggcatcagcagctgagtactttttcaaggtgggagcagagggaaaaagattccgacctacggttttgttgctcatggcatcagctctgaaatttcctttgtcagagtcaacagaaggaagagttctcagtatattggcagataaactccgcacaaggcaacagaacattgctgagataactgaaatgattcatgtcgcaagccttctgcatgatgatgttcttgatgatgctgatactaggcgtggtgtcagttcattgaatctcatcatggggaacaagctttctgtgctggctggtgatttccttctgtctagagcatgtgtggcccttgcagcacttgggaacacagaggtggtttctctaatggcaactgctgtagaacatctagttactggtgaaactatgcagatctcaacaagcagagagcaacggcgaagcatggagtactacctgcagaagacatactacaaaacggcatcattgatatcaaatagttgcaaggctgttgctattcttgcagggcacacaactgaggtctcggtgcttgcatatgaatatggtcgaaacctgggtctagccttccagttaattgatgatgttcttgatttcaccggcacctctgcatcccttgggaagggttcattgtctgatattcgccacggaattattactgccccgatgctatatgcgatggaggaattcccacaactgcaagaagttgttgaccggggttttgataatcctgcaaatgttgaaattgcccttgactatctccagaagagccgtgggattgaaaagacaaaagagcttgcacgagaacatgctgatcgtgcagtcaaggctatagaatctctacctgatagcgacgacgaggatgttctgacttcaaggcgtgctcttattgatatcacagaaagagtcatcacacggacaaaatag

SEQ ID NO: 6460 - protein, 428 aa, Zea mays
MSWRWTLARRVATLAAIGGGGAQAQRLLSTSSAGGGTGLLGRHYIPLASQIRSKVVGCRGAALVSSRWLHEAQYQVRQDGASRAQEQQDPFELVADELSLLANRLRSMVAAEVPKLASAAEYFFKVGAEGKRFRPTVLLLMASALKFPLSESTEGRVLSILADKLRTRQQNIAEITEMIHVASLLHDDVLDDADTRRGVSSLNLIMGNKLSVLAGDFLLSRACVALAALGNTEVVSLMATAVEHLVTGETMQISTSREQRRSMEYYLQKTYYKTASLISNSCKAVAILAGHTTEVSVLAYEYGRNLGLAFQLIDDVLDFTGTSASLGKGSLSDIRHGIITAPMLYAMEEFPQLQEVVDRGFDNPANVEIALDYLQKSRGIEKTKELAREHADRAVKAIESLPDSDDEDVLTSRRALIDITERVITRTK

SEQ ID NO: 6461 - DNA, 20 bp, Artificial sequence
  primer
atggttgcccaacaaacacg

SEQ ID NO: 6462 - DNA, 27 bp, Artificial sequence
  primer
ttaatattttctggcaacaatatattc

SEQ ID NO: 6463 - protein, 394 aa, Artificial sequence
  consensus sequence
  Variant (2)..(16): Xaa in position 2 to 16 is any amino acid
  Variant (17)..(31): Xaa in position 17 to 31 is any or no amino acid
  Variant (33)..(35): Xaa in position 33 to 35 is any amino acid
  Variant (36)..(37): Xaa in position 36 to 37 is any or no amino acid
  Variant (42)..(42): Xaa in position 42 is any amino acid
  Variant (45)..(45): Xaa in position 45 is any amino acid
  Variant (47)..(55): Xaa in position 47 to 55 is any amino acid
  Variant (56)..(81): Xaa in position 56 to 81 is any or no amino acid
  Variant (83)..(83): Xaa in position 83 is any amino acid
  Variant (85)..(85): Xaa in position 85 is any amino acid
  Variant (87)..(87): Xaa in position 87 is any amino acid
  Variant (90)..(91): Xaa in position 90 to 91 is any amino acid
  Variant (94)..(94): Xaa in position 94 is any amino acid
  Variant (98)..(98): Xaa in position 98 is any amino acid
  Variant (100)..(100): Xaa in position 100 is any amino acid
  Variant (103)..(103): Xaa in position 103 is any amino acid
  Variant (105)..(106): Xaa in position 105 to 106 is any amino acid
  Variant (110)..(110): Xaa in position 110 is any amino acid
  Variant (113)..(113): Xaa in position 113 is any amino acid
  Variant (114)..(129): Xaa in position 114 to 129 is any or no amino acid
  Variant (131)..(137): Xaa in position 131 to 137 is any amino acid
  Variant (139)..(139): Xaa in position 139 is any amino acid
  Variant (144)..(144): Xaa in position 144 is any amino acid
  Variant (146)..(148): Xaa in position 146 to 148 is any amino acid
  Variant (150)..(150): Xaa in position 150 is any amino acid
  Variant (152)..(167): Xaa in position 152 to 167 is any amino acid
  Variant (168)..(184): Xaa in position 168 to 184 is any or no amino acid
  Variant (186)..(186): Xaa in position 186 is any amino acid
  Variant (187)..(188): Xaa in position 187 to 188 is any or no amino acid
  Variant (190)..(192): Xaa in position 190 to 192 is any amino acid
  Variant (195)..(196): Xaa in position 195 to 196 is any amino acid
  Variant (198)..(210): Xaa in position 198 to 210 is any amino acid
  Variant (211)..(226): Xaa in position 211 to 226 is any or no amino acid
  Variant (229)..(230): Xaa in position 229 to 230 is any amino acid
  Variant (232)..(238): Xaa in position 232 to 238 is any amino acid
  Variant (240)..(257): Xaa in position 240 to 257 is any amino acid
  Variant (258)..(264): Xaa in position 258 to 264 is any or no amino acid
  Variant (267)..(267): Xaa in position 267 is any amino acid
  Variant (270)..(271): Xaa in position 270 to 271 is any amino acid
  Variant (274)..(274): Xaa in position 274 is any amino acid
  Variant (277)..(277): Xaa in position 277 is any amino acid
  Variant (278)..(284): Xaa in position 278 to 284 is any or no amino acid
  Variant (287)..(287): Xaa in position 287 is any amino acid
  Variant (288)..(288): Xaa in position 288 is any or no amino acid
  Variant (290)..(290): Xaa in position 290 is any amino acid
  Variant (292)..(292): Xaa in position 292 is any amino acid
  Variant (293)..(295): Xaa in position 293 to 295 is any or no amino acid
  Variant (297)..(297): Xaa in position 297 is any amino acid
  Variant (299)..(301): Xaa in position 299 to 301 is any amino acid
  Variant (302)..(303): Xaa in position 302 to 303 is any or no amino acid
  Variant (305)..(314): Xaa in position 305 to 314 is any amino acid
  Variant (315)..(336): Xaa in position 315 to 336 is any or no amino acid
  Variant (338)..(339): Xaa in position 338 to 339 is any amino acid
  Variant (340)..(340): Xaa in position 340 is any or no amino acid
  Variant (342)..(345): Xaa in position 342 to 345 is any amino acid
  Variant (346)..(383): Xaa in position 346 to 383 is any or no amino acid
  Variant (385)..(390): Xaa in position 385 to 390 is any amino acid
  Variant (391)..(393): Xaa in position 391 to 393 is any or no amino acid
LXXXXXXXXXXXXXXXXXXXXXXXXXXXXXXYXXXXXGGKRXRPXLXXXXXXXXXXXXXXXXXXXXXXXXXXXXXXXXXXXAXAXEXIHXXSLXHDDXPXMDXDXXRRGXPTXXXXXXXXXXXXXXXXXHXXXXXXXAXLAGDXLXXXAXFXXXXXXXXXXXXXXXXXXXXXXXXXXXXXXXXXGXXXGXXXGQXXDXXXXXXXXXXXXXXXXXXXXXXXXXXXXXKTXXLXXXXXXXGXXXXXXXXXXXXXXXXXXXXXXXXXGLXFQXXDDXLDXXXXXXXXGKXXGXDXXXXKXTXXXXXGXXXXXXXXXXXXXXXXXXXXXXXXXXXXXXXXAXXXLXXXXXXXXXXXXXXXXXXXXXXXXXXXXXXXXXXXXXXXXXXLXXXXXXXXXR

SEQ ID NO: 6464 - protein, 15 aa, Artificial sequence
  protein pattern
  Variant (2)..(2): Xaa in position 2 is any amino acid
  Variant (3)..(3): Xaa in position 3 is Ile, Leu or Val
  Variant (5)..(5): Xaa in position 5 is Ala, Cys, Ser, Thr or Val
  Variant (6)..(6): Xaa in position 6 is any amino acid
  Variant (9)..(9): Xaa in position 9 is Ile, Met or Val
  Variant (13)..(13): Xaa in position 13 is Leu or Met
  Variant (15)..(15): Xaa in position 15 is Ala, Cys or Ser
EXXHXXSLXHDDXPX

SEQ ID NO: 6465 - protein, 13 aa, Artificial sequence
  protein pattern
  Variant (2)..(2): Xaa in position 2 is Asp or Asn
  Variant (4)..(5): Xaa in position 4 to 5 is any amino acid
  Variant (9)..(10): Xaa in position 9 to 10 is any amino acid
  Variant (11)..(11): Xaa in position 11 is Ala, Ser or Thr
  Variant (12)..(12): Xaa in position 12 is any amino acid
DXDXXRRGXXXXH

SEQ ID NO: 6466 - protein, 12 aa, Artificial sequence
  protein pattern
  Variant (2)..(2): Xaa in position 2 is Ile, Leu or Val
  Variant (3)..(3): Xaa in position 3 is any amino acid
  Variant (6)..(6): Xaa in position 6 is Ile, Leu, Met or Val
  Variant (7)..(7): Xaa in position 7 is any amino acid
  Variant (10)..(10): Xaa in position 10 is Ile, Leu or Val
GXXFQXXDDXLD

SEQ ID NO: 6467 - protein, 7 aa, Artificial sequence
  protein pattern
  Variant (5)..(5): Xaa in position 5 is Ile, Leu, Met or Val
GGKRXRP

SEQ ID NO: 6468 - protein, 16 aa, Artificial sequence
  protein pattern
  Variant (2)..(2): Xaa in position 2 is Ile, Leu or Val
  Variant (4)..(4): Xaa in position 4 is Ala, Ser, Thr or Val
  Variant (7)..(7): Xaa in position 7 is any amino acid
  Variant (9)..(15): Xaa in position 9 to 15 is any or no amino acid
AXLXGDXLXXXXXXXL

SEQ ID NO: 6469 - DNA, 741 bp, Thermus thermophilus
  CDS (1)..(741): transl_table=11
atgaaggaagcccccctggtagagcacctcgaggagctccgcgcccggatcctctggtccctcctcgcctgggcggtggggacgggcgtggcctggaccttcagggtccagcttctggagtggttgaagaggcccttggacctcgcggccaaggcccacggcatccaggtcaacctcatcgtcctggacatcaccgagcccttcctcgtctccctgaaggtggccgccttcggggggcttgtgctcgcccttcccttcatcgtctaccaggtctgggccttcatcgccccggggctctatgagcacgagaagcgcctggccgtgcccttcctcctgggggcggggttcagcttcgccctgggggcgctcttcgcctactacgccttcctgcccttcgccgttcccttcctcttgggctttttgggggacgtggtcactccccagatctccatcggccgctacatgggccagatcctcatgatgctcaccgtcatgggggtggtctttgagatgccggtggtgagctacctcctcgcccgcctggggatcctcacctcctccttcctcgcccgcaactggcgcatcgccgtcgtcctcctcctcaccctggccgccttcatcacccccacggtggacgtggtctccctcttcatcgtgagcgggcccctcctcgtcctctactgggtctccgtcctggtggcccgcctcgcggaaaggcagaggccccaggaggccgcttaa

SEQ ID NO: 6470 - protein, 246 aa, Thermus thermophilus
MKEAPLVEHLEELRARILWSLLAWAVGTGVAWTFRVQLLEWLKRPLDLAAKAHGIQVNLIVLDITEPFLVSLKVAAFGGLVLALPFIVYQVWAFIAPGLYEHEKRLAVPFLLGAGFSFALGALFAYYAFLPFAVPFLLGFLGDVVTPQISIGRYMGQILMMLTVMGVVFEMPVVSYLLARLGILTSSFLARNWRIAVVLLLTLAAFITPTVDVVSLFIVSGPLLVLYWVSVLVARLAERQRPQEAA

SEQ ID NO: 6471 - DNA, 1328 bp, Glycine max
  CDS (74)..(1108)
tgggacggccgggcctggcggctccgcgtccgaaccgtgtatccaagcaaaagaaaagacgttacagcatagcatgggattgataagcgccagtgttcccatgaatatcgttcctcaattcgggtcgctccgaacacccattcgggtcggaaacccttccgggttgagcttccttcggaagaggaataacggctttgtttgcttcgccgtcgatgacgagctcagacagaagcagcaggacttgagtactaccgcaactgggctgggctccgcccttgaagaaaggcccggaaacacagatctttttgagagtacaactgaagaaacgcagggaaattttaggcaagatggtgacccaggtcctatctacgattttctttatcctgataaagagcttcttcccgatgataaagaaatgagcatatttgatcatcttgaagagctgcgacagagaatctttgtatcagttctggcagttggagcaagcattttgggatgctttgcattttcaaaagaactgataatgattcttgaagctcctgttaaatcacagggtgtaagatttcttcagctagctcctggtgaatttttcttcactactttaaaggtgtctggatactgtggccttctcttgggaattcctgtcatcctctatgaaatcatagcctttgtacttccaggacttacaaaagctgaaagaaggtttctagggccaattgttttaggctcatcggttcttttctatgccggaataactttctcctacttagttctgacacctgcagcattaaatttctttgttacctacgctgaaggtgctgttgaatcattatggtccattgatcaatactttgaatttgttctggtgcttatgttcagtacaggcttatctttccaggtacctgtcatacaatttctattgggacaacttggactggtgtctggagaccagatgctatcaatttggaggtatgttgtggttggtgcagtagtggcagctgctatagttacaccatctactgatcctctcactcaagttcttctagcggcacccttattgggtctttacttaggtggtgcatggatggtcaagcttactggacggtgaccctagccgcatcataataatgtgccagaattttcagtatgaacagatgttaatgtacattcacatagcaatctagcgtatatttttacacgtaccagagcactactcttctatattctaattgatttactagtcattcccattcttcgtcgtgttccgctcattcccaaaaaaaaaaaaaaaaaaaaaaaaaaaaaaaaaaaaaaaaaaaaaaaaaaaa

SEQ ID NO: 6472 - protein, 344 aa, Glycine max
MGLISASVPMNIVPQFGSLRTPIRVGNPSGLSFLRKRNNGFVCFAVDDELRQKQQDLSTTATGLGSALEERPGNTDLFESTTEETQGNFRQDGDPGPIYDFLYPDKELLPDDKEMSIFDHLEELRQRIFVSVLAVGASILGCFAFSKELIMILEAPVKSQGVRFLQLAPGEFFFTTLKVSGYCGLLLGIPVILYEIIAFVLPGLTKAERRFLGPIVLGSSVLFYAGITFSYLVLTPAALNFFVTYAEGAVESLWSIDQYFEFVLVLMFSTGLSFQVPVIQFLLGQLGLVSGDQMLSIWRYVVVGAVVAAAIVTPSTDPLTQVLLAAPLLGLYLGGAWMVKLTGR

SEQ ID NO: 6473 - DNA, 1392 bp, Zea mays
  CDS (113)..(1183)
gggtccccgcgcgggcggccaggcgggctcgggacatcgtctgtccgccaccggttacctctttctccaggtagcgcaccatcggaacggcgaggagcagacgggaacggggatgggaagcgctggggcgctgctctggcacacgccgcagcagctgcacggccgtggcgtcctcttccgccagagccggcctctcctgcgccagcgcaacctgcctctaatatcgctagctgccccggcgctcgagcccgagcgccgccgccggcagtgcctccgctgcgctgccgtcgacggggacggcgccccccgggagtctgggccactgccacagaaggagtctccgtccagcggcatcggtgccgcactcgaggacccgcctccaggacctcctgtggagaatggttcctttggaggcccctcacaggaagaacagagtgctctatatacttttctttatccaagcaaagacttacttccagatgataaggagatgagtatatttgatcatctagaggagcttcgtgacaggattttcatctcagttttggctgttggggctgcgatattaggctgttttgctttttcaaaagatttggttatttttcttgaggcaccagtgactgctcagggtgttcggtttttgcagctctcgcctggggaatttttctttacaacattaaaggtttcaggttattgtggccttttacttggaagtcctatcattttgtatgagatcattgcatttgttatcccaggtttaacaagggacgagcggaaatttcttgggcctattgtgttgggttcttctgttctattctatctaggcattttcttctcctacacggttctcagccctgctgcgttgaacttctttgtgaattatgcagatggggcagtggaatcgttgtggtcaatagaccagtactttgaattcatacttgtgctgatgtttagcacagggttgtcctttcaggtccctgttatccagcttttgctgggacaacttggattggtttctagtgaccaaatgctttcgatctggagatatgttgttgttggtgctgttgttgctgctgctgtgcttacaccttcgacggacccgttgacacaaatgctcctggctggtcccttgcttggtttatacttgggtggtgcatggatggtcaagataactgggcgctaactgctttgtgcaaggtgatggtgctccggatagcaagagtcccagtgtaacctagtcttgtaaaaatgaattcactctgcttgcttgtaaaaatgaattcactctgcgtgctcattagatgatactagttagttatccgacactatggtttctatatatgatatatgttttctttatacaaaagaggaaaaaaaaaaaaaaaaaaaaag

SEQ ID NO: 6474 - protein, 356 aa, Zea mays
MGSAGALLWHTPQQLHGRGVLFRQSRPLLRQRNLPLISLAAPALEPERRRRQCLRCAAVDGDGAPRESGPLPQKESPSSGIGAALEDPPPGPPVENGSFGGPSQEEQSALYTFLYPSKDLLPDDKEMSIFDHLEELRDRIFISVLAVGAAILGCFAFSKDLVIFLEAPVTAQGVRFLQLSPGEFFFTTLKVSGYCGLLLGSPIILYEIIAFVIPGLTRDERKFLGPIVLGSSVLFYLGIFFSYTVLSPAALNFFVNYADGAVESLWSIDQYFEFILVLMFSTGLSFQVPVIQLLLGQLGLVSSDQMLSIWRYVVVGAVVAAAVLTPSTDPLTQMLLAGPLLGLYLGGAWMVKITGR

SEQ ID NO: 6475 - DNA, 1212 bp, Glycine max
  CDS (80)..(1120)
aggcacataaccaagatcgaagggaaggaaaccgtatccaagcgtgtgacagtcaaaagaaaagacgttacagcatagcatgggattgataagcaccagtgttcccacgaacatcgttcctcaattcgggtctctccgaacatccatccgggtcggaaacccaaacccttccgggttgagtttcccacggaagaggaataacagttttgtttgcttggccgtcgatgacgagctgagacagaagcagcaagacttgagtactagcgccactgggctgggctccgcccttgaagaaaggcccgaaaatgcagatctttttgagagtacagctgaagaaacgcagggaaattttgggcaagatggtgaccgaggtgctatctatgattttctttatcctgataaagagcttcttcccgatgacaaagaaatgagcatatttgatcatcttgaagagctgcgacagagaatctttgtatcagtcctggcagttggagcaagcattttgggatgctttgcattttcaaaagaactaataatgattcttgaagctcctgttaaaacacagggtgtaagatttcttcagctagctcctggtgaatttttcttcacaactttaaaggtgtctgggtactgtggccttctcttgggaagtcctgtcatcctctatgaagtcatagcttttgtacttccaggacttacaaaatctgaaagaaggtttctagggccaattgttttaggctcatcagttcttttctatgccggaataactttctcctacttagttctgacacctgcagcattaaatttctttgttacctacgctgaaggtgctgttgaatcattatggtccatcgatcaatactttgaatttgttctggtgcttatgttcagtacaggcttatctttccaggtacctgtcatacaatttctattgggacaacttggactggtgtctggagaccagatgctatcaatttggaggtatgttgtggttggtgccgtagtggcagctgctatagttacgccatctactgatcctctcactcaaattcttctagcggcacccttattgggtctttacttaggtggcgcatggatggtcaagcttactggacggtgaccctagccgcatcttaatgatgtgccagaatttcaatatgaacagatgttaatgtacattcacatagcaatctagtgtatatttttacacgt

SEQ ID NO: 6476 - protein, 346 aa, Glycine max
MGLISTSVPTNIVPQFGSLRTSIRVGNPNPSGLSFPRKRNNSFVCLAVDDELRQKQQDLSTSATGLGSALEERPENADLFESTAEETQGNFGQDGDRGAIYDFLYPDKELLPDDKEMSIFDHLEELRQRIFVSVLAVGASILGCFAFSKELIMILEAPVKTQGVRFLQLAPGEFFFTTLKVSGYCGLLLGSPVILYEVIAFVLPGLTKSERRFLGPIVLGSSVLFYAGITFSYLVLTPAALNFFVTYAEGAVESLWSIDQYFEFVLVLMFSTGLSFQVPVIQFLLGQLGLVSGDQMLSIWRYVVVGAVVAAAIVTPSTDPLTQILLAAPLLGLYLGGAWMVKLTGR

SEQ ID NO: 6477 - DNA, 780 bp, Klebsiella pneumoniae subsp. pneumoniae MGH 78578
  CDS (1)..(780): transl_table=11
atgggcgtagacgatacacaaccgctaatttcgcatctgattgagctgcgcaagcgtctgctcaacagcatcattgctattctggtgatcttcctggcgctggtctatttcgccaatgatatctaccagctggtctcggccccgcttatcagtaagatgccagtgggcgcgacgatgatcgccaccgatgtcgcttcacctttctttacgccgataaagttgaccttcatggtgtcggtgatcctgtcggtgccgattattctttaccaggtatgggccttcgtcgcgccggcgttgtataagcacgaacgccggctggtggtgcctttactggtatccagtaccctgctgttctatatcggcatggctttcgcctattttgtcgtgtttccgctggcgttcggcttcctgacccatgcggcgccggaaggggtgctggtctcgaccgatattcgcagctatctcgacttcgtgatggcgctgtttatggcattcggggtctcctttgaggtgccggtcgccattgtgttgctctgctggatgggcgttaccacgccggaagacttgcgtaaaaaaaggccgtatgtgctggtgggtgccttcgtggtgggcatgctgctgacgccgccggacgtattctcgcagacactgctggccattccgatgtactgtctgtttgaagtcggggtgttctttgcccgcttctacaccgggaagcgcctgacgcgcgatgacgacgccgcggccgaagctgaagccgcagagcacagagaagagtaa

SEQ ID NO: 6478 - protein, 259 aa, Klebsiella pneumoniae subsp. pneumoniae MGH 78578
MGVDDTQPLISHLIELRKRLLNSIIAILVIFLALVYFANDIYQLVSAPLISKMPVGATMIATDVASPFFTPIKLTFMVSVILSVPIILYQVWAFVAPALYKHERRLVVPLLVSSTLLFYIGMAFAYFVVFPLAFGFLTHAAPEGVLVSTDIRSYLDFVMALFMAFGVSFEVPVAIVLLCWMGVTTPEDLRKKRPYVLVGAFVVGMLLTPPDVFSQTLLAIPMYCLFEVGVFFARFYTGKRLTRDDDAAAEAEAAEHREE

SEQ ID NO: 6479 - DNA, 876 bp, Mesorhizobium loti MAFF303099
  CDS (1)..(876): transl_table=11
gtgagcgtttcggacaaggaaaaggacgagatcgaaaaatcgtcggcgccgctgatcgagcatctcatcgagctacgtcgccggctaatctggtcgctcggcggcttcttcgtcgccttcctggtgtgcttcttcttcgccaagaagctgttcaacctcctggtcgttcccttcaaatgggcgacgaagtgggcgggtctcgacccgcacaaggtcgagctgatctacaccgcgccgcaggaattcttcttcacgcaggtcaagctcgccatgttcggcggcatggtcatcgcctttccgctgatcgccacgcagatctacaaattcatcgcgcccggcctctacaagaacgagcgcaacgccttcctgccgttcttgatcgcgtcacccgtcctgttcctgatgggcgcgtcgctggtctatttcttcttcaccccgatggttatgtggttcttccttgccatgcagcaggccggcacggacgaccaggtgcagatttcgctgctgccgaaagtgtcggaatatctcagcctgatcatgacgctgatcttctccttcggcctggtgttccagctgccggtggtgaccagtctgatgacacgtgtcggcatgctgtcgtccaaggcgctggccgagaagcgcaaatgggcgatcgtcattgctttcgtcgtcgcggcggtgctgacgccgcccgatccgatgagccagatcggtttggccatcccgaccatcctgctctacgaggtcgccatctggtcggccaggctgatcgagcgcagccaggagcgcgagcgcttggcgcgcgagaagcaggaagccggggagaccgtggccgacaagacaccggacgagcctccggcgccggctgcttcgtaa

SEQ ID NO: 6480 - protein, 291 aa, Mesorhizobium loti MAFF303099
MSVSDKEKDEIEKSSAPLIEHLIELRRRLIWSLGGFFVAFLVCFFFAKKLFNLLVVPFKWATKWAGLDPHKVELIYTAPQEFFFTQVKLAMFGGMVIAFPLIATQIYKFIAPGLYKNERNAFLPFLIASPVLFLMGASLVYFFFTPMVMWFFLAMQQAGTDDQVQISLLPKVSEYLSLIMTLIFSFGLVFQLPVVTSLMTRVGMLSSKALAEKRKWAIVIAFVVAAVLTPPDPMSQIGLAIPTILLYEVAIWSARLIERSQERERLAREKQEAGETVADKTPDEPPAPAAS

SEQ ID NO: 6481 - DNA, 738 bp, Pasteurella multocida subsp. multocida str. Pm70
  CDS (1)..(738): transl_table=11
atgcgtgttgaagattctcaacctctgatcagccacttaatggagttacgtgatcgcctactacgagcgatcatttttgttgcggtcgttttttgtgccttagtgtattttgccaacgacatctataactttgtggcttcgcctttaattgatgtgttaccggctggcgccagtatgatcgccaccaatattgctacccctttcttcacaccaatcaaattaactgcggtggttgccgtctttctctccgtgccttatttactctatcaagtctgggcatttgtggcacctgccctctatcaacatgaaaaacgcttgatttacccgctcctgttttccagtactgtcctgttttatcttggggtggctttcgcttattatgttgtctttcctctcgtgtttggtttcttaaccaaaaccgccccaacaggtgtcgcgattgctacagatatcagtagctatttggattttgtattgacgatcttcttagcatttggagtctgttttgaagtgcctgtggcgattattttattatgttggacaggcgtcactacacccgaggatcttaaaggcaaacgcccctatattattgttgctgcttttattattggcatgctattaacaccacccgatattttctcgcaaaccctacttgctatcccaatgtggttattgtttgaggttggtgtgatttttgcacgtttttatcgccctagagaggatgaagaaacgcaatag

SEQ ID NO: 6482 - protein, 245 aa, Pasteurella multocida subsp. multocida str. Pm70
MRVEDSQPLISHLMELRDRLLRAIIFVAVVFCALVYFANDIYNFVASPLIDVLPAGASMIATNIATPFFTPIKLTAVVAVFLSVPYLLYQVWAFVAPALYQHEKRLIYPLLFSSTVLFYLGVAFAYYVVFPLVFGFLTKTAPTGVAIATDISSYLDFVLTIFLAFGVCFEVPVAIILLCWTGVTTPEDLKGKRPYIIVAAFIIGMLLTPPDIFSQTLLAIPMWLLFEVGVIFARFYRPREDEETQ

SEQ ID NO: 6483 - DNA, 771 bp, Neisseria meningitidis Z2491
  CDS (1)..(771): transl_table=11
gtgtccgaaacacaaaacgaacaacccgtccaaccgcttgtcgagcatctcatcgagctgcgccgccgcctgatgtggacggttgtcggtatcttagtctgctttttcggcctaatgccgtttgcccaacaactctatacttttatcgccgacccgctgatggcaaacctgcccaaagacaccagcatgattgccaccgatgtcatcgcaccatttttcgtgccggtcaaagttaccctgatggcggcatttttaatttcgctgccgcatacgctctaccaaatctgggcattcgtcgcccccgcactctaccaaaacgaaaaacgcctgattacgccgctcgtcctctccagcgtcagcctgtttttcatcggcatggcatttgcctactttttggttttccccgtcattttcaaattccttgccagcgttacccctgtcggtgtcaatatggcgacagacatcgacaaatacctctccttcatcttggggatgtttgtcgcattcggtacaacgtttgaagtccccattgtcgttatcctgttaaccaaaattggtgtggtaacaaccgaacagctcaaacgcgcccgcccctatgtgattgtcggcgcgtttgtcattgccgccatcatcacgccgcccgatgtgatttcacaaaccctgcttgccattccgctgattctcttatacgaagcaggtatttggttcggacgctttttcacgccacgttcagaacaggatggcgacatacagccgcctgcaacaacctga

SEQ ID NO: 6484 - protein, 256 aa, Neisseria meningitidis Z2491
MSETQNEQPVQPLVEHLIELRRRLMWTVVGILVCFFGLMPFAQQLYTFIADPLMANLPKDTSMIATDVIAPFFVPVKVTLMAAFLISLPHTLYQIWAFVAPALYQNEKRLITPLVLSSVSLFFIGMAFAYFLVFPVIFKFLASVTPVGVNMATDIDKYLSFILGMFVAFGTTFEVPIVVILLTKIGVVTTEQLKRARPYVIVGAFVIAAIITPPDVISQTLLAIPLILLYEAGIWFGRFFTPRSEQDGDIQPPATT

SEQ ID NO: 6485 - DNA, 813 bp, Deinococcus radiodurans R1
  CDS (1)..(813): transl_table=11
atgacccaattgccgcccccggagcagaccgtgcttaagccagccccgccggaactggcgagcgcgccgctgttcgaccaccttgaggagctgcggcggcgcctgattctcagcgtcgtgtttctggccgtcggcatggtgatcgcctttacctaccgcgtgcagcttatcgagctggtcaaggtgccgctgacctactcggagctctacaccaccggcaaggtgcagctcgtgaccaccaagctcgcctcgcagctcttgctgagtttcaacctcgccttctgggcggggctgacgctggcgctgccttttatcgtgtggcagatctgggcgtttatcgcgccggggctctacccgcaggagcggcgctggggcctgcccttcatcctgggcgcggggttcgccttcgcggcgggcgtggtgttcggctacaagctggtgctgccgacgatggtgcccttcctgatcgagtttctggccgggaccgtcacccagatgcaggacctgcaggagtacatcggtaccgtcgtgacctttctggtcgctttcggggtggccttcgagctgccgatcctggcggtgatcctgacgcggctgggcatcgtcaaccatacgatgctgcgccagggctggcgctttgcgctgatcggcatcatgattctggccgccgtcatcacgcccacccctgaccccgccaacatggcgctggtggcggtgccgctctacgcgctgtacgaactcggcgtggtgctctcgcgggtcttccgcgtgattgcgcccgaggaacaggagcggcccgcgccgatgtcctga

SEQ ID NO: 6486 - protein, 270 aa, Deinococcus radiodurans R1
MTQLPPPEQTVLKPAPPELASAPLFDHLEELRRRLILSVVFLAVGMVIAFTYRVQLIELVKVPLTYSELYTTGKVQLVTTKLASQLLLSFNLAFWAGLTLALPFIVWQIWAFIAPGLYPQERRWGLPFILGAGFAFAAGVVFGYKLVLPTMVPFLIEFLAGTVTQMQDLQEYIGTVVTFLVAFGVAFELPILAVILTRLGIVNHTMLRQGWRFALIGIMILAAVITPTPDPANMALVAVPLYALYELGVVLSRVFRVIAPEEQERPAPMS

SEQ ID NO: 6487 - DNA, 861 bp, Mycobacterium leprae TN
  CDS (1)..(861): transl_table=11
atgtctctgatcgaccacctgactgagttgcgaacccggctactgatctcgttggccgcgattgtggtcaccacgattttcgggttcatctggtactctcattccatcttcgggttggagagtctcggcgagtggttacggcgtccgtactgttcgctgccgcaatcggcacgtgcggatatcagccccgacgggcagtgtcgattgttggccacagcgccgttcgatcaattcatgctgcgaatcaaggttgggatggccgccgggatcgtgctggcctccccagtgtggttttaccagctctgggcgttcatcacgccagggctctacacgaaggaacgccgcttcacggtggctttcgtggttccagccgcggtgctgttcgccggcggtactgtactagcatatttggtgttatccaaagcgttgggtttcttgctgattgtcggtagcggcgtgcaagtgaccgcgctttctggtgaccggtatttcggttttttgttgaaccttctggtagttttcggggtcagctttgagttcccgctgttgatcgtcatgctcaacatcgctggtcttctgacctatcagcggctgaagtcttggcgtcgtggtctaatattcgcaatgtttgtgttcgcggcggtatttacgcccggatctgacccattttcgatgacagcgcttggcgccgctctgaccgtgctgctcgagcttgccatccagctagttcggctgcacgacaagcgcagagtcaagcatgaagccttaatcgccgacgatgaagcgtctgtcatcgagccaccctcgtcgataccggagcggtcgtataccgctactaggtctcatgacgatgtcacataa

SEQ ID NO: 6488 - protein, 286 aa, Mycobacterium leprae TN
MSLIDHLTELRTRLLISLAAIVVTTIFGFIWYSHSIFGLESLGEWLRRPYCSLPQSARADISPDGQCRLLATAPFDQFMLRIKVGMAAGIVLASPVWFYQLWAFITPGLYTKERRFTVAFVVPAAVLFAGGTVLAYLVLSKALGFLLIVGSGVQVTALSGDRYFGFLLNLLVVFGVSFEFPLLIVMLNIAGLLTYQRLKSWRRGLIFAMFVFAAVFTPGSDPFSMTALGAALTVLLELAIQLVRLHDKRRVKHEALIADDEASVIEPPSSIPERSYTATRSHDDVT

SEQ ID NO: 6489 - DNA, 855 bp, Mycobacterium tuberculosis CDC1551
  CDS (1)..(855): transl_table=11
atgtcgctggtcgaccacctgaccgagttacgcaccaggttgctgatctccctggccgcgatcttggtcaccacaatcttcgggttcgtctggtattcgcattcgattttcgggttggacagcctcggagagtggctgcggcatccctactgtgccctgccgcagtcggcccgggcggatatcagcgccgacggagagtgccgtttgttggccaccgcgccgttcgaccagttcatgttgcggctcaaggtcgggatggccgccggcattgtgctggcttgcccggtgtggttctaccagctgtgggcgttcatcacgcctggtctctaccagagggagcgccgcttcgcggtggccttcgtgatcccagcagcggtgctgttcgtcgccggtgccgtactggcctacctggtgttgtccaaggcgttgggctttttgttgaccgtcggcagcgacgtgcaggtgaccgcgctgtctggcgaccgctactttggctttctgctcaacctgctggtggtgttcggggtcagcttcgaattccccctgctgatcgtgatgctgaacctggcgggcctgctgacctatgagcggctcaagtcttggcggcgcgggttgatctttgcgatgttcgtcttcgcggcgatcttcacgcccggatccgatccgttctcgatgaccgcgctcggtgcggcgttgaccgtgctgctagagctcgccattcagatcgcccgcgtgcatgacaagcgaaaagccaagcgcgaagccgcgattcccgacgacgaagcttcggtcatcgacccgccctcgccggtgccggcgccatcggtcatcggatctcatgacgacgtcacgtag

SEQ ID NO: 6490 - protein, 284 aa, Mycobacterium tuberculosis CDC1551
MSLVDHLTELRTRLLISLAAILVTTIFGFVWYSHSIFGLDSLGEWLRHPYCALPQSARADISADGECRLLATAPFDQFMLRLKVGMAAGIVLACPVWFYQLWAFITPGLYQRERRFAVAFVIPAAVLFVAGAVLAYLVLSKALGFLLTVGSDVQVTALSGDRYFGFLLNLLVVFGVSFEFPLLIVMLNLAGLLTYERLKSWRRGLIFAMFVFAAIFTPGSDPFSMTALGAALTVLLELAIQIARVHDKRKAKREAAIPDDEASVIDPPSPVPAPSVIGSHDDVT

SEQ ID NO: 6491 - DNA, 870 bp, Sulfolobus solfataricus P2
  CDS (1)..(870): transl_table=11
gtggaagaaaaagcaaaggagagaggtaaagaagagaagagttttttcgaagaaaagccattattagatcatttaagagaattagcaataagactaaggagaattatagcagcattagctatttcgttcttcttttacttcatgacaggttatgaatggattaatatagatccattacaaataccatttcttgggataagtatctcaaaaattccaattccttatccgtcattttacgatagtattgcagtacaagtaaccaaattctttatttaccatgaactgccagccaatactaagataataataataaacttatttgatccaatatatgcgtcgctttatgtttcactttacctcgcactattgacctcgcttcccctcataattagagaaacctgggcttttttagctccgggactatataaacatgaaaagaaaatctttaagctaaccatgattccagcatttctacttttcttctctggttctctatttgcgtttttgatactaatccccttaatgtttgacatgatatcattttataccgagtctttaggtcctgccgtagaacctaccataagtttaagttcgttcatatccacaactttcctattaatggggtcgttaggactagcatttgagatgccactgataatgattggtttaactcacctaagaatagttaaggctagtacttggaggaattattggagatggggagttctggtatcctttataattgcatggataatatcaccaggtacaactggtggcgttatggaaacaataataggattatcactatcgagcctatactttttaggaatgggaatctctttcttagtagagaggaaaagggaatcttaa

SEQ ID NO: 6492 - protein, 289 aa, Sulfolobus solfataricus P2
MEEKAKERGKEEKSFFEEKPLLDHLRELAIRLRRIIAALAISFFFYFMTGYEWINIDPLQIPFLGISISKIPIPYPSFYDSIAVQVTKFFIYHELPANTKIIIINLFDPIYASLYVSLYLALLTSLPLIIRETWAFLAPGLYKHEKKIFKLTMIPAFLLFFSGSLFAFLILIPLMFDMISFYTESLGPAVEPTISLSSFISTTFLLMGSLGLAFEMPLIMIGLTHLRIVKASTWRNYWRWGVLVSFIIAWIISPGTTGGVMETIIGLSLSSLYFLGMGISFLVERKRES

SEQ ID NO: 6493 - DNA, 843 bp, Sinorhizobium meliloti 1021
  CDS (1)..(843): transl_table=11
atgagccgcgatatcgaggaccggccgcagccgcttatcgagcatctgatcgaactgcgcacgcggttgatgtgggcggtgggcgcattcttcgtggcgttcctcgtctgcttctattttgccaagcagctgttcaaccttcttgttctgccgttcaagtgggccgtgagctgggccgggctcagccaccgcaacgtcgagctcatctacacggcgccgcaggagttcttcttcacgcagatcaaagtcgcgatgttcggtgcgctggtgatcgcatttccggtcatcgcgtcgcaggtctacaggttcgttgcacccggcctttacaagaacgaacgcgctgccttcctgccgttcctcgtcgcttcgccactcctgttcctgcttggcggcgcgctggtctatttcttcttcacgccgatggtcatgtggttcttcctcgccatggaacagggcggcggcgaagggcaggtcgccatccagctcctgccgaaggtgtccgagtatctcagcctcatcatgtctctggtcttcgccttcggtctggtgttccagttgccggtcatcacgacgctcctcgcgcgtgtcggcttcgtcacctcccaggggcttgccgaaaagcgcaaatacgcgatcgtgatcgccttcgtggtcgcagcggttctgacgccgccggatccggtttcccagatcggccttgcgctgccagccatccttctctacgaaatttcaatctacacggcgcgaatcgtcgaaaggcgaagggctgccgaggccctcgagcgcgaggctgcctccgagcaggaaagttcgtccgagacggctgaccccgccaagggctga

SEQ ID NO: 6494 - protein, 280 aa, Sinorhizobium meliloti 1021
MSRDIEDRPQPLIEHLIELRTRLMWAVGAFFVAFLVCFYFAKQLFNLLVLPFKWAVSWAGLSHRNVELIYTAPQEFFFTQIKVAMFGALVIAFPVIASQVYRFVAPGLYKNERAAFLPFLVASPLLFLLGGALVYFFFTPMVMWFFLAMEQGGGEGQVAIQLLPKVSEYLSLIMSLVFAFGLVFQLPVITTLLARVGFVTSQGLAEKRKYAIVIAFVVAAVLTPPDPVSQIGLALPAILLYEISIYTARIVERRRAAEALEREAASEQESSSETADPAKG

SEQ ID NO: 6495 - DNA, 903 bp, Caulobacter crescentus CB15
  CDS (1)..(903): transl_table=11
gtgagtaaagccatcggacacgatcccgacgaggagatcgaggcttcgcgcgcgccgctgctggatcacctgatcgagctgcgtatgcggctgatcatctgcgtcgtggccatcgccttggctttcggcgtctgcttcgccttcgtgaagccgatcttcctgttcctggttcgcccgttcaccgtggcggaggggctgaaggccatgcaggacgccggcggagagcacggggcgttcgaccttctgctggcgctggtcggcgtcaagaaggtcgccaccggcgccttggccaacatcaccctgcaggccaccgcgccgctggagcagttcttcaccaacatcaagctggcggcgttcgggggcatcatcctggccttcccggttatcgcctggcagctgtaccggttcgtggcgccgggtctctacaagaaggagcgcaacgcgttcctgccgttcctgatcgcctcgccggtgctgttcctgatgggcgcttcgctggtctactacgtgatgctgcccttcgttctgtggttctcgctgagccagcagatggtgggcgacggcgtgcaggtggtgttgcagacccgcgtgtcggagtacctgaccctggtcacgacactgctgttggcgttcggtctcagcttccagttgcccgtggtgctgtcgctggggggcttggcgggcttggtcacctcgcagatgctgcgcacgggtcggcgctatgcgatcgtcgccgtgttcgtggtcgcggccatcgtcacgccgcccgatccgatcagccagatcaccttggcggtgccgctttgcctgctctacgaaatctcgatctggtgcgtttggctgattgagcgccgtcgcaaggaagaagacgagaaggccggtacggacctggtcgtttcgtaa

SEQ ID NO: 6496 - protein, 300 aa, Caulobacter crescentus CB15
MSKAIGHDPDEEIEASRAPLLDHLIELRMRLIICVVAIALAFGVCFAFVKPIFLFLVRPFTVAEGLKAMQDAGGEHGAFDLLLALVGVKKVATGALANITLQATAPLEQFFTNIKLAAFGGIILAFPVIAWQLYRFVAPGLYKKERNAFLPFLIASPVLFLMGASLVYYVMLPFVLWFSLSQQMVGDGVQVVLQTRVSEYLTLVTTLLLAFGLSFQLPVVLSLGGLAGLVTSQMLRTGRRYAIVAVFVVAAIVTPPDPISQITLAVPLCLLYEISIWCVWLIERRRKEEDEKAGTDLVVS

SEQ ID NO: 6497 - DNA, 780 bp, Salmonella typhimurium LT2
  CDS (1)..(780): transl_table=11
atggctgtagaagatactcaaccgcttatcacgcatctgatcgagttgcgtaagcgcctgctaaactgcatcgtcgcagtacttctgatttttctggcgttaatttatttcgccaatgatatttatcatttagtcgccgcaccgctgattaaacagatgccgcaaggggcgacaatgattgcgacggatgtggcgtcgccgttttttacgcctatcaaactcaccttcatggtgtctttgatcttatccgcgcctgtcattttgtaccaggtttgggcctttatcgccccggcgctgtataagcatgagcgtcgtctggtcgtacctctgctggtatccagctcgctgcttttctatattggtatggccttcgcctattttgtcgtattccctttggcctttggtttcctgacgcatacggcgccggaaggggtacaggtttcgacagatatcgccagctatcttagctttgtcatggcgctttttatggcctttggcgtagcctttgaagtgccggtggcgattgtgttgctgtgctggatgggcatcaccacgccagaagatttgcgtaaaaaacggccttatatcctggtcggggcattcattgtgggaatgctgcttacgccgccagatgttttctcgcaaacgttgctggcgataccgatgtactgcctgtttgaaattggcgttttctgctcacgcttttatgtcggtaagcgacggacgcgcgacgaagataacgaggccgaaaccgaaaaggccgagcacactgaagactaa

SEQ ID NO: 6498 - protein, 259 aa, Salmonella typhimurium LT2
MAVEDTQPLITHLIELRKRLLNCIVAVLLIFLALIYFANDIYHLVAAPLIKQMPQGATMIATDVASPFFTPIKLTFMVSLILSAPVILYQVWAFIAPALYKHERRLVVPLLVSSSLLFYIGMAFAYFVVFPLAFGFLTHTAPEGVQVSTDIASYLSFVMALFMAFGVAFEVPVAIVLLCWMGITTPEDLRKKRPYILVGAFIVGMLLTPPDVFSQTLLAIPMYCLFEIGVFCSRFYVGKRRTRDEDNEAETEKAEHTED

SEQ ID NO: 6499 - DNA, 795 bp, Nostoc sp. PCC 7120
  CDS (1)..(795): transl_table=11
atgaccccctcacaagaagtagatacaataaccactcctgagattgatacagaaggatacggcaactcagatattgattctcccgatgagttgcctggtgaagtcgaaatgtctctattcgaccacctagaagaattaagacagcgcatcttttattcactgattgccgtagcagtgggtgtagttggctgcttcttcgctgtcaagccaattgttcagttactagaagtcccagcccaaggtgttaaatttctccagttagcccccggagaatatttctttgtttctctcaaagttgcaggctacactggcttgttactttctagtcccttcattctctaccaaattattttgtttgttcttcctggattgactcggcgcgaacgtggtctacttgggcctattgttttagggtcaagcgtgctgtttgccggcggtttagtctttgcttatttacttttgattcccgccgctttgaattttttcatcagttacggcgcggatgttgtggaacaactctggtctatcgacaaatattttgaatttgtactattgcttttatttagtactgggttggctttccaagttcccataattcaacttttactagctaatttagggattgtttcatcccaaagaatggtttctggctggcgatttgtaattatggcagccgtagttttaggtgctgtacttacaccttctactgaccccttaactcaaagtcttttggcgggcgcggtgcttgccctttactttggtggtattggtgtagtgaagctcacaggtaaatga

SEQ ID NO: 6500 - protein, 264 aa, Nostoc sp. PCC 7120
MTPSQEVDTITTPEIDTEGYGNSDIDSPDELPGEVEMSLFDHLEELRQRIFYSLIAVAVGVVGCFFAVKPIVQLLEVPAQGVKFLQLAPGEYFFVSLKVAGYTGLLLSSPFILYQIILFVLPGLTRRERGLLGPIVLGSSVLFAGGLVFAYLLLIPAALNFFISYGADVVEQLWSIDKYFEFVLLLLFSTGLAFQVPIIQLLLANLGIVSSQRMVSGWRFVIMAAVVLGAVLTPSTDPLTQSLLAGAVLALYFGGIGVVKLTGK

SEQ ID NO: 6501 - DNA, 804 bp, Agrobacterium tumefaciens str. C58
  CDS (1)..(804): transl_table=11
atgagcggggataccgaggacaagccgcagccgcttatcgaacacctgatggaactgcgcacacggctgatctggtcgctcggcgcgttttttatcgccttcatcgcctgtttcgccgtcgccaagcacctcttcaacctgctcgtcatcccctataagtgggcggtgatctgggccgggctggatgtggcgaaatcgtcgctgatctataccgcgccgcaggaattcttcttcacgcagatcaaggtcgccatgttcggcgcgatggtcatctcctttccggtgatcgcctcgcagctttataaattcgtggcgccgggtctctacaagaatgaacgcgccgcctttctgccgttcctgattgcgtcgccgatcctgttcctcatcggcgcggcactcgtctatttcttcttcacgcctatggtcatgtggttcttcctcgccatgcagcaattgcctgtggatggtgaagtggcgatttcgctgatgcccaaggtgtcggaatatctcagcctcatcatgacgctggtgctgtccttcggcctggtgttccagttgcccgtcgtcaccacgcttctggctcgtgtcggaattctgaccagcgactggctcagggaaaagcgcaaattcgccatcgtcatggcctttgtggtcgcggccgtgctgacaccgccggaccccatgtcccagatcggtcttgcgctgcctgcgatcattctctacgagatttccatctacatggctcgactcgtggagaggaaacgtgcggcggaatccaaaagcacggagctggaagagacctga

SEQ ID NO: 6502 - protein, 267 aa, Agrobacterium tumefaciens str. C58
MSGDTEDKPQPLIEHLMELRTRLIWSLGAFFIAFIACFAVAKHLFNLLVIPYKWAVIWAGLDVAKSSLIYTAPQEFFFTQIKVAMFGAMVISFPVIASQLYKFVAPGLYKNERAAFLPFLIASPILFLIGAALVYFFFTPMVMWFFLAMQQLPVDGEVAISLMPKVSEYLSLIMTLVLSFGLVFQLPVVTTLLARVGILTSDWLREKRKFAIVMAFVVAAVLTPPDPMSQIGLALPAIILYEISIYMARLVERKRAAESKSTELEET

SEQ ID NO: 6503 - DNA, 825 bp, Brucella melitensis 16M
  CDS (1)..(825): transl_table=11
gtgaaccgggacgaggatgaaatcgaacagagcgcagcgcctctgcttgaacacctgatcgaactgcgccgccgccttatttgggctatcctggcttttttcgtggcattcattttctgctttgctttcgcaaaacagctcttcaacctgcttgtggtgccgtatcaatgggccatcgactgggccggcatggaccgctccaaggcggaattgatctataccgcacctcaggaattcttcttcacgcaggtgaaggtggccatgttcggcggcattgtgctggccctcccggtcatcgccgcacagatttataaattcgtggctcccggtctctacaagcacgaacgcactgcatttctgccgttcctgatcgcgtcgcccattctgttcctgatcggcggcgcgctcgtctatttctttttcacgcccatggtgatgtggttcttcctcgccatgcagcagaccggcggcagcggcgaggtccagatttcgcttctgccgaaagtgtcggaatatctgagcctcatcatgacgctcatctttgcttttggcctggtcttccagttgccggtggtgacgagcctcatggcgcgtgtggggctggtgacttcggcggggctgaaggacaagcgcaaatatgcgatcgtcattgccttcgtcgcggctgcggtgctgaccccgccggacccggcgagccagatcggtcttgccttgccgacgatccttctttacgagatttcgatctttctggcgcgcatgatcgagaagaagcgggatgaggcgcaggcatctgccgacgctgataacaacgcttcctccacctga

SEQ ID NO: 6504 - protein, 274 aa, Brucella melitensis 16M
MNRDEDEIEQSAAPLLEHLIELRRRLIWAILAFFVAFIFCFAFAKQLFNLLVVPYQWAIDWAGMDRSKAELIYTAPQEFFFTQVKVAMFGGIVLALPVIAAQIYKFVAPGLYKHERTAFLPFLIASPILFLIGGALVYFFFTPMVMWFFLAMQQTGGSGEVQISLLPKVSEYLSLIMTLIFAFGLVFQLPVVTSLMARVGLVTSAGLKDKRKYAIVIAFVAAAVLTPPDPASQIGLALPTILLYEISIFLARMIEKKRDEAQASADADNNASST

SEQ ID NO: 6505 - DNA, 1023 bp, Arabidopsis thaliana
  CDS (1)..(1023)
atgagcagcacaagcactagttctgctcttatccaccatttccgcctcaccactcgcaacttgggttcgcctacaaagcagcgttgtccttacgctgtaactttctgcaattcgtggagggaagctggactccgatactccgtcacgcaacgccggagcaaaggctttgggccggtgtcagctctcaatgacgacgattcaccaacagagaccacccccggcgttggctctgctgtagaagacagaccaccagattcatctgaagatagatcaagttcggtctatgagtttctgtatccccgtaaagaggagctccctgatgacaaagaaatgactattttcgaccatctcgaggagctccgggagagaatattcgtctctgttttggctgtaggagctgcaatcttgggatgcttcgccttctccaaagatcttattgtctttcttgaagctcccgtcaaaactcagggtgtacggtttctccagcttgctcctggcgaatttttcttcacaactttaaaggtctccggttattgcgggcttctactagggagcccagtgatcctgtatgagattatagcttttgtccttcccggtctgacacgggctgagagaaggtttctggggccaattgtatttggctcctcattgctcttctatgctggacttgctttctcctactgggttttaacccctgcagccttgaatttctttgtgaattacgctgaaggtgtggtagaatctctgtggtctatcgaccagtactttgagtttgtactagtgcttatgttcagcacaggcctttctttccaggttccagtcattcagttactcctgggacaagtaggggttgtgtcgggagatcaaatgctatcaatttggagatatgtggtggtaggtgcggtggttgcagcagctgttgtcacaccctcgacagaccctgtcactcaaatgctcctagcaacaccgcttctggggctctacttgggtggtgcatggatggtcaagctcacaggtcggtga

SEQ ID NO: 6506 - protein, 340 aa, Arabidopsis thaliana
MSSTSTSSALIHHFRLTTRNLGSPTKQRCPYAVTFCNSWREAGLRYSVTQRRSKGFGPVSALNDDDSPTETTPGVGSAVEDRPPDSSEDRSSSVYEFLYPRKEELPDDKEMTIFDHLEELRERIFVSVLAVGAAILGCFAFSKDLIVFLEAPVKTQGVRFLQLAPGEFFFTTLKVSGYCGLLLGSPVILYEIIAFVLPGLTRAERRFLGPIVFGSSLLFYAGLAFSYWVLTPAALNFFVNYAEGVVESLWSIDQYFEFVLVLMFSTGLSFQVPVIQLLLGQVGVVSGDQMLSIWRYVVVGAVVAAAVVTPSTDPVTQMLLATPLLGLYLGGAWMVKLTGR

SEQ ID NO: 6507 - DNA, 945 bp, Corynebacterium glutamicum ATCC 13032
  CDS (1)..(945): transl_table=11
atgtccattgttgagcacatcaaagagtttcgacgccgacttcttatcgctctggcgggcatcctcgtgggcaccattatcggctttatttggtacgatttctcattttggcagatccccactttgggcgagctgctgagggatccgtactgttctctgcctgctgaatcccgctgggccatgagcgactcagaggaatgtcgactgctcgcaaccggcccgtttgatccattcatgcttcgccttaaagtagcggcgttggtgggtatggttcttggctcacccgtgtggctgagccagctgtggggctttatcaccccaggtttgatgaagaatgagcgccgttacaccgcaatcttcgtcacgattgctgttgtgctgtttgtcggcggtgctgttcttgcgtacttcgtcgttgcatatggtttggagttcctccttaccattggtggagacacccaggcagcggccctgactggtgataagtacttcggattcttgctcgcgttgttggcgattttcggcgtgagcttcgaagttccactggtgatcggcatgctcaacattgtgggtatcttgccttacgatgccattaaagataagcgacgcatgatcatcatgattttgttcgtgttcgctgctttcatgacacccggccaggatcctttcaccatgttggtgttggcgctttcactcaccgttctggtagagcttgccctgcagttctgtcgtttcaacgacaaacgccgggacaagaagcgcccagaatggcttgatggcgatgacctctctgcatcaccactggatacttctgctggtggagaagatgctccaagcccagtcgaaaccccagaggcggtggagccttcgcggatgctgaacccaagtggggaggcgtcgataagctataaacccgggcgcgccgacttcggtgacgtgctctag

SEQ ID NO: 6508 - protein, 314 aa, Corynebacterium glutamicum ATCC 13032
MSIVEHIKEFRRRLLIALAGILVGTIIGFIWYDFSFWQIPTLGELLRDPYCSLPAESRWAMSDSEECRLLATGPFDPFMLRLKVAALVGMVLGSPVWLSQLWGFITPGLMKNERRYTAIFVTIAVVLFVGGAVLAYFVVAYGLEFLLTIGGDTQAAALTGDKYFGFLLALLAIFGVSFEVPLVIGMLNIVGILPYDAIKDKRRMIIMILFVFAAFMTPGQDPFTMLVLALSLTVLVELALQFCRFNDKRRDKKRPEWLDGDDLSASPLDTSAGGEDAPSPVETPEAVEPSRMLNPSGEASISYKPGRADFGDVL

SEQ ID NO: 6509 - DNA, 951 bp, Streptomyces coelicolor A3(2)
  CDS (1)..(951): transl_table=11
ttgctgaagcctgcccgcaacaaggagaaggaccccgaggggcggatgccgctcgcggaacaccttcgtgagctccgcaaccggctcgcgaaggcgctgctggccatcgtcgtcgtcacggtggtcgccgccttcttctatcagtggatcatcaacgccctcacggatccgatcctccagtcgatcggctgtgagaagtcgttcgcggagctggcccagtcggaggccggctcggagccgtgcgcgcagatcaccatcaacggtctgctcggccccttcaccctggcgctgaaggtgtccctgacggccggtgtcgtgctggcctcgccggtctggctctaccagctgtgggcgttcgtcgccccggggctgcacaggaacgagaagaagtacgcctacgcgttcgtcgccaccggcgccccgctcttcctcgccggcgcgtacttcgcctacgcggtgctccccacctcggcgaaggtgctgatcgagttcacgccgaacgacgtcgacaacctgctgccgctggacgagctgctcgacctcgtcacgcgcatggtggtcgtcttcggtctctccttcgagctgcccctgctgctggtcatgctcaacttcaccggcgtgctgaccggcaagcggatgctcggctggtggcgcgcgatgatcatgggcatcacgctgttcgcggccatcgccacgcccagcaccgacccgctgacgatgatcatgctggccggtccgatctgggtcctgtacttcgccgcggtcgtcgtctccctgctgaacgaccgccgcaaggcccgcctcgaggccctggagcccgacgacgacgaggcgtccgacctggacctcacccccgaggacatcggcgaggtcgagcccgtgaccaccgcccgtgccctgcccgagcaggccacgaaggaccgggtcaacggctacgacgacgtgacctga

SEQ ID NO: 6510 - protein, 316 aa, Streptomyces coelicolor A3(2)
MLKPARNKEKDPEGRMPLAEHLRELRNRLAKALLAIVVVTVVAAFFYQWIINALTDPILQSIGCEKSFAELAQSEAGSEPCAQITINGLLGPFTLALKVSLTAGVVLASPVWLYQLWAFVAPGLHRNEKKYAYAFVATGAPLFLAGAYFAYAVLPTSAKVLIEFTPNDVDNLLPLDELLDLVTRMVVVFGLSFELPLLLVMLNFTGVLTGKRMLGWWRAMIMGITLFAAIATPSTDPLTMIMLAGPIWVLYFAAVVVSLLNDRRKARLEALEPDDDEASDLDLTPEDIGEVEPVTTARALPEQATKDRVNGYDDVT

SEQ ID NO: 6511 - DNA, 738 bp, Chlorobium tepidum TLS
  CDS (1)..(738): transl_table=11
atgagcttccttgatcatctcgaagagcttcgctggaggctcatctggtctcttatcgcatttgttgtagcggccatcgttaccgcattcttttcagactttctcgtcaaccaggtactcatcagaccactaaaagagagtggcccgaacattcatttgcagaaccttgtgccctacggccagatttcgctctacctgcaagtgattgtttttgcggcatttgtgctcgcgttcccctttctggtctggcagatatggcaattcgtcgaacctggcttgcatgaaaccgaaaaagcagccagccgttttatcattttcttcatttcgatctgcttcttctcgggcatcgctttcggttactttgtcttcctgccaatctcactgaaattctttgcgggattcggctccgaactcatcgccaacaacatcgccatccaggactacatcagtttcttcatgggcaccctgctgacaaccggtctggttttcgagctgcccttcgtatcttatgtgctctcgaaaatcggtttgctaaccccggccttcatgcgcttttaccgtcgccatgcggtcgtagcgctgctgatcatcgccgccatcgtcacgccgtcaaccgatatggtcacacaggcagtcatcgccattccgatgatcgtgctgtacgaaatcagcatctacatttcagccgctgtacagaaaaagcgcaacaagaagatgatggaggagggcgttgcatga

SEQ ID NO: 6512 - protein, 245 aa, Chlorobium tepidum TLS
MSFLDHLEELRWRLIWSLIAFVVAAIVTAFFSDFLVNQVLIRPLKESGPNIHLQNLVPYGQISLYLQVIVFAAFVLAFPFLVWQIWQFVEPGLHETEKAASRFIIFFISICFFSGIAFGYFVFLPISLKFFAGFGSELIANNIAIQDYISFFMGTLLTTGLVFELPFVSYVLSKIGLLTPAFMRFYRRHAVVALLIIAAIVTPSTDMVTQAVIAIPMIVLYEISIYISAAVQKKRNKKMMEEGVA

SEQ ID NO: 6513 - DNA, 822 bp, Thermosynechococcus elongatus BP-1
  CDS (1)..(822): transl_table=11
atgacgcgatcgcccgatattccagatattgagagtccctctcctaactcctcagccattgctgacaggtccttggaggaaaacatcccccttgacccggaggatgaattgcccaacgaagtggaaatgtccctctgggatcaccttgaggagttgcggcagcggctctttgttgtcctcggcaccgttgctgttactattgggctctgctttagccaagtccgctggatcattgagttccttgaaaaaccagcccaaggcgccaagttcctgcaactgagtccgggggaatacttttttgtctcctgtaaagcggcggcctacagcggcattctgctggccaccccaatgattctctaccaggccatccgttttatcctgccgggattgacacggcgtgagcaacgcttgctggcaccggtggttttcggttcatcccttctctttattgctggtttggtgtttgcctataccctcttggctcccgctgccctcggctttttcattagctatggggcagaggtggttgagcaactgtggtcgatcgatcgctatgtggactttattttgctgttgctccttgccactggccttgcctttcaagtccccattctccagatggttctcattgccctaggcattgtctcaattgcgcaactccttagccaatggcgctacgtggtgatgattgccgtggccgtggcagcggtcttgaccccctccatcgacccgattactcagggactgttggcggctgcgctgcttgccctctactttacggggattggcttggcgaagctaatggggatggggcgtccttaa

SEQ ID NO: 6514 - protein, 273 aa, Thermosynechococcus elongatus BP-1
MTRSPDIPDIESPSPNSSAIADRSLEENIPLDPEDELPNEVEMSLWDHLEELRQRLFVVLGTVAVTIGLCFSQVRWIIEFLEKPAQGAKFLQLSPGEYFFVSCKAAAYSGILLATPMILYQAIRFILPGLTRREQRLLAPVVFGSSLLFIAGLVFAYTLLAPAALGFFISYGAEVVEQLWSIDRYVDFILLLLLATGLAFQVPILQMVLIALGIVSIAQLLSQWRYVVMIAVAVAAVLTPSIDPITQGLLAAALLALYFTGIGLAKLMGMGRP

SEQ ID NO: 6515 - DNA, 777 bp, Shigella flexneri 2a str. 301
  CDS (1)..(777): transl_table=11
atgtctgtagaagatactcaaccgcttatcacgcatctgattgagctgcgtaagcgtctgctgaactgcattatcgcggtgatcgtgatattcctgtgtctggtctatttcgccaatgacatctatcacttggtatccgcgccattgatcaagcagttgccgcaaggttcaacgatgatcgccaccgacgtggcctcgccgttctttacgccgatcaagctgacctttatggtgtcgctgattctgtcagcgccggtgattctctatcaggtgtgggcatttatcgccccagcgctgtataagcatgaacgtcgcctggtggtgccgctgctggtttccagctctctgctgttttatatcggcatggcattcgcctactttgtggtctttccgctggcatttggcttccttgccaataccgcgccggaaggggtgcaggtatccaccgacatcgccagctatttaagcttcgttatggcgctgtttatggcgtttggtgtctcctttgaagtgccggtggcaattgtgctgctgtgctggatggggattacctcgtcagaagacttacgcaaaaaacgcccgtatgtgctggttggtgcattcgttgtcgggatgttgctgacgccgccggatgtcttctcgcaaacgctattggcgatcccgatgtactgtctgtttgaaatcggtgtcttcttctcacgcttttacgttggtaaagggcgaaatcgggaagaggaaaacgacgctgaagcagaaagcgaaaaaactgaagaataa

SEQ ID NO: 6516 - protein, 258 aa, Shigella flexneri 2a str. 301
MSVEDTQPLITHLIELRKRLLNCIIAVIVIFLCLVYFANDIYHLVSAPLIKQLPQGSTMIATDVASPFFTPIKLTFMVSLILSAPVILYQVWAFIAPALYKHERRLVVPLLVSSSLLFYIGMAFAYFVVFPLAFGFLANTAPEGVQVSTDIASYLSFVMALFMAFGVSFEVPVAIVLLCWMGITSSEDLRKKRPYVLVGAFVVGMLLTPPDVFSQTLLAIPMYCLFEIGVFFSRFYVGKGRNREEENDAEAESEKTEE

SEQ ID NO: 6517 - DNA, 762 bp, Pseudomonas putida KT2440
  CDS (1)..(762): transl_table=11
atgagtatcgccatggaccctgccgcgagcatgcccctgaccgaacacctgcgcgacctgcgcaaacgcctggtgcgttgcctggcgctggtggcattggtgttcgccggcctgttcccctttgcccagacactgtacacgctcatatccgagccgctacggcgctttttgccggaaggcgcgagcatgatcgccaccagcgtcacctcgccctttctggcaccgttcaagctgaccgcgatgtgcgccctgttcctggccatgccgctgctgctgcatcaggcctggggttttctggcgccggggctgtaccgccgtgaacggcgcattgccctgccgctgctggtatcgagcatcgttttgttctatgccggcatggcgttcgcgttctttctggttttcccgatgatgttcggtttctttgccagcgtgacaccggacggcgtggcgatgatgaccgatatcagccagtacctggactttatcctggcgctgtttctggcgttcgggctggcgttcgagatcccggtggcgacgttcatcgtggtctgggcagggttggccgatgtggccacattgcggcgcagcaggccctacgtggtcgtcgggtgctttgtggtggggatgatcctgacaccgccggatgtgttttcgcagacgatgctggcagtgccgatgtgggtgctgttcgagatggggttgctggcttgtggaatgttgaagcggccggagccaggcaaggagattgtggctggattgtag

SEQ ID NO: 6518 - protein, 253 aa, Pseudomonas putida KT2440
MSIAMDPAASMPLTEHLRDLRKRLVRCLALVALVFAGLFPFAQTLYTLISEPLRRFLPEGASMIATSVTSPFLAPFKLTAMCALFLAMPLLLHQAWGFLAPGLYRRERRIALPLLVSSIVLFYAGMAFAFFLVFPMMFGFFASVTPDGVAMMTDISQYLDFILALFLAFGLAFEIPVATFIVVWAGLADVATLRRSRPYVVVGCFVVGMILTPPDVFSQTMLAVPMWVLFEMGLLACGMLKRPEPGKEIVAGL

SEQ ID NO: 6519 - DNA, 789 bp, Pseudomonas putida KT2440
  CDS (1)..(789): transl_table=11
atgagcgagaacccggaacacgaccagccaatgccgctggtttcgcacctgaccgaactgcgcacccgcctgctgcgctgcgttgccgtcattttcctgatctttgccgggctgttctccttcgcccagcagatctacacactggtttccgcgccactgcgcgagcacttgccggccaatgcaacgatgatcgccaccgatgtggcctcgccgttcctcacgccgttcaagctgaccatgatcgtctcgctgttcctggccatcccgttcatccttcagcagatctgggggtttatcgcgccagggctgtaccgccatgaaaagcgcatcgccattccactgttggtgtcgagcatcttcctgttctatgccggtatggcattcgcctatttcctggtattcccgctgatcttcggtttcttcgccagcgctacaccagaaggcgtttcgatgatgaccgacatcgcaagctacctcgacttcgtgatgacgctgttcttcgcctttggcgtggccttcgaaatcccagtggcggtggtgctgctggtgtggatcggcgtggtcgacgtgaagtacctgaagaaagtccgcccgtatgtgatcatcggctgcttcgtggtcggcatggtcctcaccccaccggacatcttctcccagaccctgctggccgtgcccatgtggctgctgttcgagatcggcgtgctgtgcggcagcctgatccgcaagcgcagcgcccacgacgaaaccgccgacgaccataacgaccagccaccagcgacccaaccgtga

SEQ ID NO: 6520 - protein, 262 aa, Pseudomonas putida KT2440
MSENPEHDQPMPLVSHLTELRTRLLRCVAVIFLIFAGLFSFAQQIYTLVSAPLREHLPANATMIATDVASPFLTPFKLTMIVSLFLAIPFILQQIWGFIAPGLYRHEKRIAIPLLVSSIFLFYAGMAFAYFLVFPLIFGFFASATPEGVSMMTDIASYLDFVMTLFFAFGVAFEIPVAVVLLVWIGVVDVKYLKKVRPYVIIGCFVVGMVLTPPDIFSQTLLAVPMWLLFEIGVLCGSLIRKRSAHDETADDHNDQPPATQP

SEQ ID NO: 6521 - DNA, 741 bp, Vibrio parahaemolyticus RIMD 2210633
  CDS (1)..(741): transl_table=11
atgtctaccgtcgagcagacacagcctttaattagtcatttgttggagcttcgcaaccgactactgcgttcaattttggcagtgttggtggtgtttgtcgggctaatttatttctctaaccacatttacgagtttatctccgcacctttggttgaacgtttaccagaaggcgcgacgatgatcgcaaccgatgtggcatcaccatttttcactcctctaaaactgacgcttatcgcttcagtatttgttgcggtgccgtttattttgtatcaggtttgggcctttgttgcgccaggtctgtacaagcacgaacgtcgtttgatcatgccattgctgttttctagctcgttgctgttttactgtggcgtggcctttgcgtattacgtggtatttccactggtatttggcttctttactgcgatttctctcggtggggttgagtttgcgaccgatatttcgagctacctagattttgtgctggcgctgtttatggcgtttggtattgcgttcgaagtgccagtggcgatcatcctactttgttggactggggcgaccacgccgcaagacctaaaagagaagcgtccatacattattgtggctgcgttcgttgtcggcatgctgctgacgccgccagacatgatttcgcagacgttacttgcgatcccaatgtgcttactgtttgaggttggtctgttctttgctcgtttttacactcgtaaagatgaggaagaagaggagtaa

SEQ ID NO: 6522 - protein, 246 aa, Vibrio parahaemolyticus RIMD 2210633
MSTVEQTQPLISHLLELRNRLLRSILAVLVVFVGLIYFSNHIYEFISAPLVERLPEGATMIATDVASPFFTPLKLTLIASVFVAVPFILYQVWAFVAPGLYKHERRLIMPLLFSSSLLFYCGVAFAYYVVFPLVFGFFTAISLGGVEFATDISSYLDFVLALFMAFGIAFEVPVAIILLCWTGATTPQDLKEKRPYIIVAAFVVGMLLTPPDMISQTLLAIPMCLLFEVGLFFARFYTRKDEEEEE

SEQ ID NO: 6523 - DNA, 750 bp, Haemophilus ducreyi 35000HP
  CDS (1)..(750): transl_table=11
atgtcaattgaagaatcacagcctctgattagccacttagttgaattaagaaaccgcttattgcgtgcaattgtttgtgttttggttgttttttgtatgttggtgtattgggcaaatgatatctatacattgcttgctacaccgctcactgaaaactttcctgcgggcgcaacaatgattgcaaccaatgttactacgcctttttttactccacttaagttaaccggcgtggtggcaatcttcttgtccgtgccatttattttgtatcaaatttgggcatttgtcgcaccagcactctataagcacgaaaaacgcttggtttatccattactcgtgtctagtacattgttattttatactggggttgctttcgcctattatgttgtatttccactagtatttggctttctgaccagtaccgcaccagaaggtgtacaagtagccactgatatcagtagctatttagattttgtcttaactattttcttagcttttggtatttgctttgaagtgcctgtagccatcattttactttgttggtctggcgtaacttcagctgatgatttacgaagcaaacgtccatatattattgtcgctgcatttgcaattggtatgttattaacaccgcctgatgttttttctcaaacgttgttagccattccaatgtgtttattatttgaagttggcctattcttctctaaattctataagcctcgtgatgagcaatcaccaacagaaaatattgaataa

SEQ ID NO: 6524 - protein, 249 aa, Haemophilus ducreyi 35000HP
MSIEESQPLISHLVELRNRLLRAIVCVLVVFCMLVYWANDIYTLLATPLTENFPAGATMIATNVTTPFFTPLKLTGVVAIFLSVPFILYQIWAFVAPALYKHEKRLVYPLLVSSTLLFYTGVAFAYYVVFPLVFGFLTSTAPEGVQVATDISSYLDFVLTIFLAFGICFEVPVAIILLCWSGVTSADDLRSKRPYIIVAAFAIGMLLTPPDVFSQTLLAIPMCLLFEVGLFFSKFYKPRDEQSPTENIE

SEQ ID NO: 6525 - DNA, 801 bp, Bordetella pertussis Tohama I
  CDS (1)..(801): transl_table=11
gtgagccaggacgcctccaacgacaatcccgaccagcagcaggacagcttcatctcgcacctggtcgaactgcgcagccgcctgctcaaggccgccggcgccgtggtcgccgtattcatcgtgctgttcctgtatcccggcgcctcggccatctacgacgtgctggcccagcccatgctggcttcgctgcccgaaggcacccgcatgatcgccaccggcgtcatcacgccgttcatggtgcccgtcaaggtcaccatgatggccgccttcgtggtggccctgccggtggtgctgtaccaggcctgggccttcgtcgcccccggcctgtacaagcacgagaagcgcctggcgctgccgctgatcctctccagcacgctgctgttcatcatcggcatggcgttctgctatttcttcgtgttccgcacggtctttcacttcatcgccacgttcgcgccgcagtcgatcacgccggcgcccgacatcgaggcctatctcagcttcgtcatgacgatgttcatggccttcggcatcacgttcgaggttccggtggccgtggtgctgctggtcaagaccggcatcgtcgaagtggccaagctgcgcgccgcgcgcggctacgtcgtggtgggcgccttcgtcatcgcggccgtggtcaccccgcccgacgtggtcagccagttcatgctggccgtgccgctgtgcctgctgtacgaggtaggcctgctgtgcgcgcgcctggtcacgcccagacgccgcggcgaggaagaatccgaagacgaccaggccctgaccgagcggcactga

SEQ ID NO: 6526 - protein, 266 aa, Bordetella pertussis Tohama I
MSQDASNDNPDQQQDSFISHLVELRSRLLKAAGAVVAVFIVLFLYPGASAIYDVLAQPMLASLPEGTRMIATGVITPFMVPVKVTMMAAFVVALPVVLYQAWAFVAPGLYKHEKRLALPLILSSTLLFIIGMAFCYFFVFRTVFHFIATFAPQSITPAPDIEAYLSFVMTMFMAFGITFEVPVAVVLLVKTGIVEVAKLRAARGYVVVGAFVIAAVVTPPDVVSQFMLAVPLCLLYEVGLLCARLVTPRRRGEEESEDDQALTERH

SEQ ID NO: 6527 - DNA, 747 bp, Prochlorococcus marinus str. MIT 9313
  CDS (1)..(747): transl_table=11
gtggaaatgcctctggttgatcacctggaggaattacggcagcgagtgctgcgcagtctgcttgctgttgttttagcggcaggtgcctgcctgctcatggtgaagccgctcgtacggctgttggaagctccggctggatccattcactttcttcagctggccccaggagagtttctattcgtctcaatcaaggtggcaggctacgcaggcttaacacttgcactgccctatgtgctctaccaagggcttggatttgtattgcctggcctcactcaacgggaacgacgtctgatcgcgccagcagtagctggatcagcgatcttgtttctagccggccttgccttcgcctggtgggccctagcaccagcagctctgaagtttctggtgagttatggcgccgatgtagtcgagccactgtggtcaattgagcggtatctcgattttgtgcttctgctgatgctggctaccggcctggcctttcagctacctgtgctccagttgatattaggaattctggggttattgcactggcaacccatgttgagtgcctggcgatgggtcgtgcttggtgccgccttggctggagctgtattgaccccatccactgatccaatcaccatgctgctgctggctggagccattacagcccttttcctgattggagtaggcctagtggcgctaactgatcaattcaggccagacatgcctgcaagcgaaagcgaccagcctcctacagccacaaattga

SEQ ID NO: 6528 - protein, 248 aa, Prochlorococcus marinus str. MIT 9313
MEMPLVDHLEELRQRVLRSLLAVVLAAGACLLMVKPLVRLLEAPAGSIHFLQLAPGEFLFVSIKVAGYAGLTLALPYVLYQGLGFVLPGLTQRERRLIAPAVAGSAILFLAGLAFAWWALAPAALKFLVSYGADVVEPLWSIERYLDFVLLLMLATGLAFQLPVLQLILGILGLLHWQPMLSAWRWVVLGAALAGAVLTPSTDPITMLLLAGAITALFLIGVGLVALTDQFRPDMPASESDQPPTATN

SEQ ID NO: 6529 - DNA, 900 bp, Synechococcus sp. WH 8102
  CDS (1)..(900): transl_table=11
gtgacccactccgggccgagacccgactcagcagcctcgaggcttctagcctggccattagaaagggctgacgcgtcggccagatcagccatcccctccgtgcccgacagctccgacggtccagttctcaagcccccgccaccgatccgcatcagcggtggcaccgacccgagcgcattgcccaacgaggtggagatgcctctggtggatcaccttgaggaactgcgccagcgcgtgctgcgcagcctgctggcggtggtcgtttcagccctggtctgcctgttggcggtgaagccgttggtgcgactgctggaggttccggcccagggaattcacttcctgcagttggcccccggtgaattcctgttcgtgtcgctgaaggtagccggctacgccggcctcacgcttgcccttccctacgtgctgtttcagctgctggcctttgtgctccctggactaacgattcgggaacgtcggcttatcgcacccgcggttgccggatctgcagtgttgtttctggcggggattgcttttgccgggtgggccctggtccctgcagccctgcgctttctggtgagctacggcgccgatgtggtcgagccgctctggtcgatcgagcgttatctggatttcgttctgttgctgatgctggccacaggcctggcctttcagttgccggtgctgcagctgttgctgggcgtgttggggctggtgcgctggcgcacgatgctgggggcctggcgttgggtggtgctgggctcagccctcgctggggccgtgctgaccccctcaaccgacccaatcacgatgctgttgttggcgggcgccatcacagccttgttcctgatcggcgtggggctggtggcattcaccgagagcctcagaccagaaactccctga

SEQ ID NO: 6530 - protein, 299 aa, Synechococcus sp. WH 8102
MTHSGPRPDSAASRLLAWPLERADASARSAIPSVPDSSDGPVLKPPPPIRISGGTDPSALPNEVEMPLVDHLEELRQRVLRSLLAVVVSALVCLLAVKPLVRLLEVPAQGIHFLQLAPGEFLFVSLKVAGYAGLTLALPYVLFQLLAFVLPGLTIRERRLIAPAVAGSAVLFLAGIAFAGWALVPAALRFLVSYGADVVEPLWSIERYLDFVLLLMLATGLAFQLPVLQLLLGVLGLVRWRTMLGAWRWVVLGSALAGAVLTPSTDPITMLLLAGAITALFLIGVGLVAFTESLRPETP

SEQ ID NO: 6531 - DNA, 744 bp, Chromobacterium violaceum ATCC 12472
  CDS (1)..(744): transl_table=11
atgaacgaacaaccgctgctcgcgcacctgatcgagctgcgcacccggctggtgcgcgcgctgctcggcatcgccctggtcttcctggggctgttccactggtcgtccgacatctaccacctgttggccaagccgctgctggacgctttgccgcagggcggcagcatgatcgccaccgaggtgacctccaccttcttcgtgccgatgaaggtgaccatgctggtggccttcctgatctcgctgcccaacacgctgtaccagatctgggccttcgtcgctcccggcctgtacagccacgagaaaaagctggtgctgccgctggtgctggccagcctgctgctgttcctcaccggcatggccttcgcctatttcctggtgtttccggtggtgttccacttcatgtcggcggtgacgccggccggcgtcagcatgatgacggacatcgacaaatacctgtccttcgtcctgggcatgttcctggccttcggcaccacgttcgaggtgccggtgctggtggtgctgctgacgaggatgggggtggtgacggtggccaagctgcgcgaggcgcggccctacgtgatcgtcggcgcctttgttgtcgccgccatcgtcacgccgcccgacgtgctgtcgcagacgctgctggcggtgccgctgtggctgctgttcgaggccggggtgctggtggcggcgctgctggagcgcaaggcgcgcgcccgcgaacaggcggagtccgcgccttga

SEQ ID NO: 6532 - protein, 247 aa, Chromobacterium violaceum ATCC 12472
MNEQPLLAHLIELRTRLVRALLGIALVFLGLFHWSSDIYHLLAKPLLDALPQGGSMIATEVTSTFFVPMKVTMLVAFLISLPNTLYQIWAFVAPGLYSHEKKLVLPLVLASLLLFLTGMAFAYFLVFPVVFHFMSAVTPAGVSMMTDIDKYLSFVLGMFLAFGTTFEVPVLVVLLTRMGVVTVAKLREARPYVIVGAFVVAAIVTPPDVLSQTLLAVPLWLLFEAGVLVAALLERKARAREQAESAP

SEQ ID NO: 6533 - DNA, 726 bp, Wolinella succinogenes DSM 1740
  CDS (1)..(726): transl_table=11
atgtttgaagagctaaaaccccatattcaagagctaagaaagcgtctcattaacgcggttgttgctctttttattgccttttttatctgttttttcttttgggaaggaatcttagactggatgatcgcccccctcaaagccgccttgcccgcaggtagcaacgtgatctttactgaggtaggagaggctttcttcactgccattaaagtctccttttttagcgctttcatgttctccttgcccgtaattttttggcaagtttggctttttgtcgcccctggactctaccaaaacgaaaagatgctcgtgctcccctttgtcttttttggaacactcatgtttgtcacaggcgcactttttgcctattatgtggtctttccctttggcttcacctatctcatcaactttggaagcaccctcttcacggctctccctagcgttggattttatgtcactttttttgccaagctcatgattggctttgggattgcctttgagcttcctgtcgttacctttttccttgccaagcttggtctagtcaccgataaaacccttagggattttttcaaatatgccatcattattatctttatcgtggccgccatcctcacccctcctgatgtcatcacgcaattcatgatggcgattcctttgaccttcctctattgggtctctatcctcatcgccaaaatggtcaatcctgaaacaagccctaatgaagagtaa

SEQ ID NO: 6534 - protein, 241 aa, Wolinella succinogenes DSM 1740
MFEELKPHIQELRKRLINAVVALFIAFFICFFFWEGILDWMIAPLKAALPAGSNVIFTEVGEAFFTAIKVSFFSAFMFSLPVIFWQVWLFVAPGLYQNEKMLVLPFVFFGTLMFVTGALFAYYVVFPFGFTYLINFGSTLFTALPSVGFYVTFFAKLMIGFGIAFELPVVTFFLAKLGLVTDKTLRDFFKYAIIIIFIVAAILTPPDVITQFMMAIPLTFLYWVSILIAKMVNPETSPNEE

SEQ ID NO: 6535 - DNA, 786 bp, Gloeobacter violaceus PCC 7421
  CDS (1)..(786): transl_table=11
atgaccgctacgcgccccgacttcgaacaagaagacaatccgcccgagaccgacgacgccctcgactccaaggacgaatttccggacgaggtcgagatgaccctgggggagcacctcgaagagttgcgcacccgcctcttctgggcgcttggcacctttatcgcggccactatcggctgttttatcttcgtcaaaccgatcgtcgatctgctgcagaagccggcgggcacgacggtcaaattcatccagaccatcccaggcgaatttttctttgtctcgtttaaagtggcggcctacagcggtctgatggtcgcggccccgatgattctctatcaaattgtgcgcttcgtgctgccggggctcagtcgccgcgagcgcaaactcatcctgcccatcgtggtcggctccagtgtgctgttcgtcgtgggcgtcgtctttgcctttatggtcctggccccggccgccctcaacttttttgtgagctacggcgacggcgtcgtcgatcagacctggacgatcgagcgctatttcgacttgatgttcgtgatgctgatcagcaccggcatcgtctttcaggtaccgatcttgcaggtgctgctcggggtgacggggatcgtctcctccgagcggatgttctcggtctggcgctatgtgagcgtcttcgcggtggtgctgggggccgtcgtcaccccctcgaccgatccgctcacccagacctttctagccggggcggtgacaatcctctattttggcggcgcgggcgcggtcaaactgattggcaagtaa

SEQ ID NO: 6536 - protein, 261 aa, Gloeobacter violaceus PCC 7421
MTATRPDFEQEDNPPETDDALDSKDEFPDEVEMTLGEHLEELRTRLFWALGTFIAATIGCFIFVKPIVDLLQKPAGTTVKFIQTIPGEFFFVSFKVAAYSGLMVAAPMILYQIVRFVLPGLSRRERKLILPIVVGSSVLFVVGVVFAFMVLAPAALNFFVSYGDGVVDQTWTIERYFDLMFVMLISTGIVFQVPILQVLLGVTGIVSSERMFSVWRYVSVFAVVLGAVVTPSTDPLTQTFLAGAVTILYFGGAGAVKLIGK

SEQ ID NO: 6537 - DNA, 783 bp, Photorhabdus luminescens subsp. laumondii TTO1
  CDS (1)..(783): transl_table=11
atggctgttgatgatactcaaccacttatcagtcaccttattgaactgcgtaagcgaattctaaacagtttacttactgtattagtggtttttttagcgttggtttatttttctaacgacatctatcagatgatttctgcacctttgattaagcagttgcctcaaggtgccagtatgatagcgacagatgttgcttcccccttttttacgccaataaaactgaccattatggtgtcaatattcgtatctgcacctatggttctctatcaagtgtgggcatttattgcacctgcgttatataagcatgaacgccgcttgatgatccctctgcttgtttccagtagcctgctattttatttggggatggcgtttgcttattttgttgtatttccgatagcttttggattctttgctaaaacggcacctgaaggagtgctgattgcaacggatatcagtaactacttaagctttgtcatggcactgtttatggcctttggtgtctcttttgaagtacccgttgccattattttattatgttggagtggggtagttacacccgaatctttgaagaaaaagcgtccgtatattttggtcggggcctttgttgttggcatgttgttaacgccgccggatgttttctcgcaaaccttgctggcgattcctatgtatttgctgtttgaactggggattttgctctcccgtttttataccgggcagcggaaattgggggatcgttcagaggaagatgagcaggaagcgccagaagtgaatacggaaaagtga

SEQ ID NO: 6538 - protein, 260 aa, Photorhabdus luminescens subsp. laumondii TTO1
MAVDDTQPLISHLIELRKRILNSLLTVLVVFLALVYFSNDIYQMISAPLIKQLPQGASMIATDVASPFFTPIKLTIMVSIFVSAPMVLYQVWAFIAPALYKHERRLMIPLLVSSSLLFYLGMAFAYFVVFPIAFGFFAKTAPEGVLIATDISNYLSFVMALFMAFGVSFEVPVAIILLCWSGVVTPESLKKKRPYILVGAFVVGMLLTPPDVFSQTLLAIPMYLLFELGILLSRFYTGQRKLGDRSEEDEQEAPEVNTEK

SEQ ID NO: 6539 - DNA, 1095 bp, Corynebacterium diphtheriae NCTC 13129
  CDS (1)..(1095): transl_table=11
atgagcaacgttgatgttcagtccactaccaaggcgacgagggttcgtcggaatcggattcataatcctttttctgtgcgtccgaaacgtcctaccgatggctcgatgtctcttgtagagcatttgcaagaacttcgccgtagagtgatcatatcagttttggctttgattgttggcaccatcgtggggttcatgtggtatcaacacccagtcaatctccattggtttacgctgcgttcccttggcgatatcttgcgcggaccatactgttcgcttccacctgaaaacagggcagtcttaactcttgacggtgaatgcagactcatcgccaccagcccgtttgagatgtttatgcttcgcctcaaagttggcgcgcttgcaggttcagtcttcgcttcgccagtgtggctgcaacagctgtgggctttcatcacgccaggattgatgaaaaacgaacgccggtggacgttatcttttgtcacagcggcggttaccttattcgtttccggtgctgttttagcctattttgttatcgcaattggtctgcagtttctactcacaatgggtggcgagtttcaggtgaccgcgttgtctggcggccaatacttcaatttcatcctcaccctgcttgtcatgttcggtgtgagctttgaggtgccacttattatcgcaatgctcaatctcgccggaattttaagctatgaatcaatcaaagataagcgacgcatcataatcgtatctgtctttatttttgctgcattcatgacaccaggccaagatccatattcaatggtggcgctcggcgcgtcattatgcctgcttgtggaacttgcgattcaattcacgcggttgaatgacaaacgtcgtaagaatacacgtcctgattggatggacgttgatgatgaacatgcttctgtgctcacaccatcatccgactctcttgagggtagtagccctattacttcttcggctccaatcgcaccaaccagtcctatctctgcatcggctccagaatctccgtcagctgtggctccctctacattagaacgaccacaacggcttgatacgcaatctaattttgatgacgtactttag

SEQ ID NO: 6540 - protein, 364 aa, Corynebacterium diphtheriae NCTC 13129
MSNVDVQSTTKATRVRRNRIHNPFSVRPKRPTDGSMSLVEHLQELRRRVIISVLALIVGTIVGFMWYQHPVNLHWFTLRSLGDILRGPYCSLPPENRAVLTLDGECRLIATSPFEMFMLRLKVGALAGSVFASPVWLQQLWAFITPGLMKNERRWTLSFVTAAVTLFVSGAVLAYFVIAIGLQFLLTMGGEFQVTALSGGQYFNFILTLLVMFGVSFEVPLIIAMLNLAGILSYESIKDKRRIIIVSVFIFAAFMTPGQDPYSMVALGASLCLLVELAIQFTRLNDKRRKNTRPDWMDVDDEHASVLTPSSDSLEGSSPITSSAPIAPTSPISASAPESPSAVAPSTLERPQRLDTQSNFDDVL

SEQ ID NO: 6541 - DNA, 816 bp, Rhodopseudomonas palustris CGA009
  CDS (1)..(816): transl_table=11
atgagtgccgaggatatcgaggcctccaaggcgccgctgatggaccacctgatcgagctgcggtcgcggctgatcaaggcgctgcttggcttcggcatcgcgttcatcttctgcttcttcttcgccaagcagatctacaatgtgctggtgtggccgttcgtctgggtcgcggggccggagaactccaagttcatctataccgcgctgctcgaatacttcctcacccagctcaagctggcgatgttcggcgccggcttcatctcgttcccgatcatcgctacccagatctacaaattcgtcgcgccgggcttgtacaagcacgagcgcaacgccttcgtgccgtacctgatcgccaccccgggcttcttcctactcggctcgctggtggtgtacttcctggtgctgccgatgctggtgcggttctcgctcggcatgcagcagatgggcggcgccgagaccgcgcagatccagctcctgcccaaggtcggcgagtatctgtcgctgatgatgtcgctgatctttgcgttcggcctggcgttccagttgccggtgatcctgacgctgctcggccggatcggcgtgctgaccgccaagcagctcaaggagaagcgccgctacttcatcgtcggcgccttcatcatcgccgcggtgctgaccccgcccgacgtgatcagccaggcctcgctcgcgatcccgctgctgctgctgtacgagggctcgatcatcgcggtgtcgatggtggagaagaagcgcgctgcggcagacgctagcgctagcgccaacgccagcaccgactcctcgacaccggccgcctaa

SEQ ID NO: 6542 - protein, 271 aa, Rhodopseudomonas palustris CGA009
MSAEDIEASKAPLMDHLIELRSRLIKALLGFGIAFIFCFFFAKQIYNVLVWPFVWVAGPENSKFIYTALLEYFLTQLKLAMFGAGFISFPIIATQIYKFVAPGLYKHERNAFVPYLIATPGFFLLGSLVVYFLVLPMLVRFSLGMQQMGGAETAQIQLLPKVGEYLSLMMSLIFAFGLAFQLPVILTLLGRIGVLTAKQLKEKRRYFIVGAFIIAAVLTPPDVISQASLAIPLLLLYEGSIIAVSMVEKKRAAADASASANASTDSSTPAA

SEQ ID NO: 6543 - DNA, 867 bp, Geobacter sulfurreducens PCA
  CDS (1)..(867): transl_table=11
atgtcagaagataatcagaaggtcctgccgttcctcgaacatctggtggaactgcgcaagcggcttatcatcatcattgtggcggttgtggtgggcatggggttcgcctggaacctttcgaacggcctccttcactttgttacgaagccgatcaccggcgaaacctacctcactgacatcaagaagcaggtatatcaggaagtgggcaagcgtttcccagccgcttacaagcagtttgagcttgaaaaggcgatgaacgcggcacccaaggagcgcaagctcaactacagcgccccccttgagccctttttcgtccagtgcaagatatcggttatcgccggatttatcctggcgcttcccgttgtgttttaccagctctggcttttcatcgcgccggggctcacccggaaagaaaagcggatggtgctgcccttcgtgaccgtaagtacggtgagtttctgcgtgggggcactctttttcctggtagtcatctggccggtcatcatcaatttctccctgtcctatgaagcggaggggctcaacagcctcttcaacatgagtgcgtacatcaacttctgcctccgcctgatcctgatgttcggcctcatcttcgagttgccgatcctgatgctgcttctgtcgcgcttcggaattgttacctatcagttcttggcccgcaaccgtcgctacgccctcctggcaagttccattgtggctgccttccacgccgacctcatcaccatgttcgtcatcatggtgccgctgtatatgatgtacgagatcagcgtctggctcgtcctcctcttcggcaagaaaaagccggtggaggcagtggccggcgaggggccgaccggcgccgcgtcatga

SEQ ID NO: 6544 - protein, 288 aa, Geobacter sulfurreducens PCA
MSEDNQKVLPFLEHLVELRKRLIIIIVAVVVGMGFAWNLSNGLLHFVTKPITGETYLTDIKKQVYQEVGKRFPAAYKQFELEKAMNAAPKERKLNYSAPLEPFFVQCKISVIAGFILALPVVFYQLWLFIAPGLTRKEKRMVLPFVTVSTVSFCVGALFFLVVIWPVIINFSLSYEAEGLNSLFNMSAYINFCLRLILMFGLIFELPILMLLLSRFGIVTYQFLARNRRYALLASSIVAAFHADLITMFVIMVPLYMMYEISVWLVLLFGKKKPVEAVAGEGPTGAAS

SEQ ID NO: 6545 - DNA, 762 bp, Wolbachia endosymbiont of Drosophila melanogaster
  CDS (1)..(762): transl_table=11
atgaactggaactcaagcaaatacgcctcattttatgagcactttgcggaactcagaaaaagagttatcttttgctttctatttttttgcgttgcttttggtttttgttattactttaaggaaaatatataccgttttttactcgcacctttaatagaagcaacaaaaggtagcgaaggtttttctttaatttacacagacttaacagaggcattttttgtgtatctccaagttgcaataatgagcgcacttttgttttcttttcctgtgtttgcatggcaattttatatgttcttagcacctgggttatataaaagtgaaagggcagtgttgttgccatacttgattgcaacaccggttttatttgtaacgggagctactgtagtctattactatatatttcctttagcctggaagtttttcatcacttttgaacatagtgggaaatctttcggtataccaatagagtttatgccatcagttagcgaatatttagacctcgttctccaatttatgtttgcttttggcactgcatttcaaattccagtaatactcacattaatggtgagagtagggttactcactacacaaagtttgtcaaataaacgcagaatcgcgatagtggtaatttttattatcgctgcaatcttaactccacctgatgtattaagccaagtagggcttgcaatacctatgctgattctatatgaattgtccattctgatatgtaggtatattgaaaaaaagaagacaaagatttaa

SEQ ID NO: 6546 - protein, 253 aa, Wolbachia endosymbiont of Drosophila melanogaster
MNWNSSKYASFYEHFAELRKRVIFCFLFFCVAFGFCYYFKENIYRFLLAPLIEATKGSEGFSLIYTDLTEAFFVYLQVAIMSALLFSFPVFAWQFYMFLAPGLYKSERAVLLPYLIATPVLFVTGATVVYYYIFPLAWKFFITFEHSGKSFGIPIEFMPSVSEYLDLVLQFMFAFGTAFQIPVILTLMVRVGLLTTQSLSNKRRIAIVVIFIIAAILTPPDVLSQVGLAIPMLILYELSILICRYIEKKKTKI

SEQ ID NO: 6547 - DNA, 762 bp, Bdellovibrio bacteriovorus HD100
  CDS (1)..(762): transl_table=11
atgagacgcgaagaactcgattccaaagcccaatctttgtatgagcacctgtcagatcttcgtaaatgtctgatcaattgtgtttggattctgctgatcgcaacgggcatctgctacggcttcagtgaaaagattttcgatttcgtgcgtgagccgatccgcccgtaccttcctggtggcggtctgatctataccggcccgttggataaattcattgcccatctgaagctttctttcgtatgtgggatcttgctgtcttgccctttctggctttatcaggtgtggaagttcattgctccgggcctttacgccaaagagcgcaaatacaccatgggttttattttctcgggcacgggtttgtttgtgttgggggcggcattttcttactggatcgcgcttccgatggccttccagtttttgatgacctatggtggtgaggtcgataaacccatgatttccatcgaccagtacatgggtttcttcacccagatgtgtctgatgtttggtgtggcctttgaattgccgttggtgatcgtggttctgggaatgatgggcattgtgtcccagtccttcctgcgcaagaaccgccgctatgcgattatgacaattgcaacaattgcggcgatcatcactccgccggacctgctgagcatggtgatgatgttggcgccgatgtgggttctatttgaggccgcagtcctgatcgtcggcatctttgaaaagaaacgagaagacgcttacgctgtgaacgagcgcgagtag

SEQ ID NO: 6548 - protein, 253 aa, Bdellovibrio bacteriovorus HD100
MRREELDSKAQSLYEHLSDLRKCLINCVWILLIATGICYGFSEKIFDFVREPIRPYLPGGGLIYTGPLDKFIAHLKLSFVCGILLSCPFWLYQVWKFIAPGLYAKERKYTMGFIFSGTGLFVLGAAFSYWIALPMAFQFLMTYGGEVDKPMISIDQYMGFFTQMCLMFGVAFELPLVIVVLGMMGIVSQSFLRKNRRYAIMTIATIAAIITPPDLLSMVMMLAPMWVLFEAAVLIVGIFEKKREDAYAVNERE

SEQ ID NO: 6549 - DNA, 951 bp, Mycobacterium sp. JLS
  CDS (1)..(951): transl_table=11
gtgcaaacccccggattcctcaagcggctcaacccgcggcaacgccgcgcacgggtcaatcccgacggcaccatgtcgttggtcgaacaccttcacgagctgcgcaaccggctcctggtggccgccgcggcgatcgtgctgacgaccatcttcggtttcttctggtacagccacggcatcctcggcttccacagcctcggcgaatggctgcgcggcccgtactgcgcgctgcccgagtccgcgcgcgcctccatcaccgaggacgggcagtgccgcctgctggccaccgcgccgttcgaccagttcatgcttcgcctgaaggtggcgctgatggcgggcatcgtgctggcctgcccggtgtggctgcatcaggtgtgggcgttcatcacccccggcctgtaccgcaacgaacgccggttcgcgatggcgttcgtgaccatcggggcggtgctcttcatcagcggcgcgatcctggcctacgtggtgctcgccaccgccctgggattcctgctgaccgtcggcagcgacgtgcaggtcaccgcgctctcgggtgaccagtacttcgggttcttgatcaacctgctgctggtgttcggcttcagcttcgaattcccgctgctgatcgtgatgctcaacttcatcgggatgctgccctacgagcgcctcaaggcgtggcggcgcggcctgatcttcgcgctgttcgtgttcgccgccttcttcacacccggctccgacccgttctccatgctcgcgctggcgtgtgcgctgaccgtgctgctcgagttcgcgatccaggtcgcgcgcatccacgacaagcgcaaggcgaagcgggaagccgccgaaaccgtgccggaggacgaggccgcgccgatcggcggcgtcgaaccgatcgaaccgcccagcgcggtgtcgagcccctcccgatccaccattcatgacgaatccacctga

SEQ ID NO: 6550 - protein, 316 aa, Mycobacterium sp. JLS
MQTPGFLKRLNPRQRRARVNPDGTMSLVEHLHELRNRLLVAAAAIVLTTIFGFFWYSHGILGFHSLGEWLRGPYCALPESARASITEDGQCRLLATAPFDQFMLRLKVALMAGIVLACPVWLHQVWAFITPGLYRNERRFAMAFVTIGAVLFISGAILAYVVLATALGFLLTVGSDVQVTALSGDQYFGFLINLLLVFGFSFEFPLLIVMLNFIGMLPYERLKAWRRGLIFALFVFAAFFTPGSDPFSMLALACALTVLLEFAIQVARIHDKRKAKREAAETVPEDEAAPIGGVEPIEPPSAVSSPSRSTIHDEST

SEQ ID NO: 6551 - DNA, 774 bp, Desulfovibrio vulgaris subsp. vulgaris str. Hildenborough
  CDS (1)..(774): transl_table=11
atgacccttctcgaccatctgggcgagttgcgtgtgcgcctcgtgcgctgcctcatcgccgtgggtctcgcctttgcgggctgctactcattcgccgaaaaactcttcgacctgctgatgcagccgctggtcaaggccatgccgcccgacagcaagctcatcttcacagccctgcccgaagccttcttcgtgtacatgcaggtgggtctcgtggcagccacattcgtggcgagccctttcatcttctatcagatatgggcgttcatatctcccggcctctacgaagaggagaagaagaacgccatccccatcgcgctgttctccgcctcgttcttcatcggcggcgcggcgttctgctactttcaggtctttccctacgcgttcgagttcttcatgggttttgcgacagaccgcatcctgcccatgccctcactcagcgaatatctgggcttcgcgctgaagatgcttctggccttcggcatcatcttcgagatgccgctattcaccttcttcctcgccaaactcggcattctcaccgccgggatgatgcgccgcggaaggaaatacgccatactgggcatattcatcgtggccgccatactgacgccccccgacgtcttctcgcagatgctcatggcgtgcccgatgctggtgctgtatgagataagcatcttcatcgccgccgccgtgggtcgcaaggagaagaccgacgaagaggaagatggcgacgctgacgaagccaccccggacgaacgccctgaacagggccactag

SEQ ID NO: 6552 - protein, 257 aa, Desulfovibrio vulgaris subsp. vulgaris str. Hildenborough
MTLLDHLGELRVRLVRCLIAVGLAFAGCYSFAEKLFDLLMQPLVKAMPPDSKLIFTALPEAFFVYMQVGLVAATFVASPFIFYQIWAFISPGLYEEEKKNAIPIALFSASFFIGGAAFCYFQVFPYAFEFFMGFATDRILPMPSLSEYLGFALKMLLAFGIIFEMPLFTFFLAKLGILTAGMMRRGRKYAILGIFIVAAILTPPDVFSQMLMACPMLVLYEISIFIAAAVGRKEKTDEEEDGDADEATPDERPEQGH

SEQ ID NO: 6553 - DNA, 795 bp, Bartonella henselae str. Houston-1
  CDS (1)..(795): transl_table=11
atgaatgttaagaaagatgaagttgatgccaatatggcaccccttttagagcatttgattgaactacgtcagcgaattattgctgctctgatcgcatgttttatcgcttttattatatgttttcttgtcaaagattatatcttaaattttttgatattgccttatcagtgggcaatgaaaatatcaggtggtaatcctgagggtattcgtttgcaatcaacacaagtatgggaaacttttttaacgaagatgaaacttgctgcttttggggcaactattttgtcttttccttatacggcttttcagttttatagctttattgcaccaggactttataaaaatgagcgtatggcttttttaccatttctcattggtggaccgattttattttgtgttggtggggcgtttgtttatgctctgttggcaccgattatgctttggtttagcctttctcagcaatttcttccggatgttcatttaagaatagagtttatagtgcgtatctccgattatttgagttttatgacatcgtttattctaatttttggtttgatttttcaattgcctcttgtcacgagtcttttaatgaaagttggacttttaacttctcatagtttagcgtctaaacgaaagtgggctattctcatctcttttataattgcagcaatagtaacgccatcggatttttttactatgtttgcggtagcattaccaactatagctctttacgagatctcaattttaattgcctactatatggaaaagaaaaaaaattcctttaagagaagtttataa

SEQ ID NO: 6554 - protein, 264 aa, Bartonella henselae str. Houston-1
MNVKKDEVDANMAPLLEHLIELRQRIIAALIACFIAFIICFLVKDYILNFLILPYQWAMKISGGNPEGIRLQSTQVWETFLTKMKLAAFGATILSFPYTAFQFYSFIAPGLYKNERMAFLPFLIGGPILFCVGGAFVYALLAPIMLWFSLSQQFLPDVHLRIEFIVRISDYLSFMTSFILIFGLIFQLPLVTSLLMKVGLLTSHSLASKRKWAILISFIIAAIVTPSDFFTMFAVALPTIALYEISILIAYYMEKKKNSFKRSL

SEQ ID NO: 6555 - DNA, 747 bp, Acinetobacter sp. ADP1
  CDS (1)..(747): transl_table=11
atgacggaacatattgtcagtgaaagcctcactgaaatgaaatatagcgaacatttaaaagaattaagaaaacgactgatctatagcattggtattgttttagcgatttttttattattactcccgcttgctcagaagaactaccattttcttgctcaccctttaatttcattgcttcctagcaactccaccatgattgcaacagatgtgatgagtacatttttagcaccatttaaactcaatatttatttttcgattttattaagtattccctttattctttatcaattttggcaatttgtcgctcccgcactttatcaaaaagaaaaaaggttcggtatagcactcgtgatttcgagtaaccttttattttatttaggaattgtgtttgcctatactttaattttgccacttgctttaaagttcttcgtattggcatcgcccgataatgtgttacccatgacagatatcaatagctatctagatttttgtttaaagctttttctagcttttggtctggcatttcaaattccagttttaacttatattcttatttttattggccttatttctattcaacagctagaagcacatcgtaaacacatcattgtattcttcttttttattgcaatgtttattacccctcctgatgtttttagcatgcttgctcttgcagtcccaatgtggttgttatttgaattgggtttatgggtcacaaaattcacaacgcaaaaaaacatccattaa

SEQ ID NO: 6556 - protein, 248 aa, Acinetobacter sp. ADP1
MTEHIVSESLTEMKYSEHLKELRKRLIYSIGIVLAIFLLLLPLAQKNYHFLAHPLISLLPSNSTMIATDVMSTFLAPFKLNIYFSILLSIPFILYQFWQFVAPALYQKEKRFGIALVISSNLLFYLGIVFAYTLILPLALKFFVLASPDNVLPMTDINSYLDFCLKLFLAFGLAFQIPVLTYILIFIGLISIQQLEAHRKHIIVFFFFIAMFITPPDVFSMLALAVPMWLLFELGLWVTKFTTQKNIH

SEQ ID NO: 6557 - DNA, 756 bp, Erwinia carotovora subsp. atroseptica SCRI1043
  CDS (1)..(756): transl_table=11
atggccgatgaagatactcaaccgctaattagccacctgattgagctacgtaagcggctactgaacagcattatctgtgtgctggcggtatttgttgtgctggtgtactttgccaatgacatttaccaagtggtttctgccccgctcatcaagcaattgcctgtgggcgccagcatgatcgcgaccgatgtcgcctcacctttctttacgccgataaagctgacgatgattgtctcagtgtttgtcgccgcgcctttggtgctgtatcaggtgtgggcgtttgtggctcctgctctgtataaacacgaacgtcgcttaatgatgccgttgctggtatccagcagcctgctgttttattcgggtatggcgttcgcgtactttgtggtattcccgctggcatttggcttttttgcgaaaaccgcgcccgtcggcgtgttgattgcgaccgacatcaataactacctcgatttcgttatggcgctgttcatggcattcgggatatcgtttgaagtgccggttgccattgtgctgctctgctggagtggtgtggtgacgccagaagatctgaagaaaaagcggccttatattttggtgggtgcattcgttgtcgggatgctgctgacgccgccggatgttttctcacaaacgctactggcgattccgatgtatctgctgtttgaaatcggtgtgttcttcgcgcggttttatgttggcaaaggccgacgacggactgaaactgaagagccattgcagtaa

SEQ ID NO: 6558 - protein, 251 aa, Erwinia carotovora subsp. atroseptica SCRI1043
MADEDTQPLISHLIELRKRLLNSIICVLAVFVVLVYFANDIYQVVSAPLIKQLPVGASMIATDVASPFFTPIKLTMIVSVFVAAPLVLYQVWAFVAPALYKHERRLMMPLLVSSSLLFYSGMAFAYFVVFPLAFGFFAKTAPVGVLIATDINNYLDFVMALFMAFGISFEVPVAIVLLCWSGVVTPEDLKKKRPYILVGAFVVGMLLTPPDVFSQTLLAIPMYLLFEIGVFFARFYVGKGRRRTETEEPLQ

SEQ ID NO: 6559 - DNA, 786 bp, Propionibacterium acnes KPA171202
  CDS (1)..(786): transl_table=11
atgtcgctcctggaccacatccgggagctccgttaccggatcattgtgtcgtttatagcggtggtcattacgagctccgtggcctttgtcttttaccgtccgctggttgagatcgtcatgcatccgtaccagcaggcgagcctcgccatcaaggcgaagaacccgacggcctccctccaggtagtcaatactggtgtcgtcgccccgttcgtgctgaatatgagggtggccattgttgctggcctcattgctgcctgccccatttggctctatcaggtctgggcttttattgttcctggcttgctcgtcaatgagaagaagtgggctctgcgattcctgggatcggctatccccctgtttcttctaggatcagtactggggtattgggtgctcccgaagggtattgccttgatgctgaacttcacgcctcacggcatgggcattaccaacctgctcgacatgaatgcgttcttggcactggagattcgcgtcatcttgctctttggagtgagtttcctgctgccggtggtcttggtcttgctcaatctgattcacgtcttgtcgtctgcgcagctgaaggcggcacggaagtggtccatctttggattcttctgtctgggcgcttttgtgaacccgtctggtgacccaatttccatgtgcgctttggctattccgctgagcgtcatgtatgtcattgcggaatggatttgccgcagcaatgaacgtaagcgctcgaccgacaatatgggtattgataagtcagaattcgatattcagatcgattga

SEQ ID NO: 6560 - protein, 261 aa, Propionibacterium acnes KPA171202
MSLLDHIRELRYRIIVSFIAVVITSSVAFVFYRPLVEIVMHPYQQASLAIKAKNPTASLQVVNTGVVAPFVLNMRVAIVAGLIAACPIWLYQVWAFIVPGLLVNEKKWALRFLGSAIPLFLLGSVLGYWVLPKGIALMLNFTPHGMGITNLLDMNAFLALEIRVILLFGVSFLLPVVLVLLNLIHVLSSAQLKAARKWSIFGFFCLGAFVNPSGDPISMCALAIPLSVMYVIAEWICRSNERKRSTDNMGIDKSEFDIQID

SEQ ID NO: 6561 - DNA, 717 bp, Symbiobacterium thermophilum IAM 14863
  CDS (1)..(717): transl_table=11
atgcaggacaaagaactgaccctcgtggagcacctgaccgagctgcgggagcgcatcatcaagtcgctgatcgccgtcgcgatcggcttcttcgccgcggttttcctctcgcagcccgtcttccagcacatcatggaacaggccaaggcggaaggggtccagctgatccagtacaacttcgcggacacgttcatcacgcagatcaagctggcgctgatcctggggctggtgctggcctttcccgtggtgctctaccaggtgatcgccttcatcctgccggccttgaagccggaggagaagcggctgctcttcatcggcctgccgtttgccacagggttgttcctggccggctgggccttcggctacttcatcgtcgtgcccatcacgaaagagttcttcaagtcgatggcacaggcgtcgctggtcgaggtggctgtcacgcccagcaactacctgtcgttcatcctcagcatctgcaacccgctgggcatcgccttcgagctgccgctggtggtgctgatcctggcgcggatcgggctggtgactcaccagttcctgggacgggtgcggaagtacgccttcctggccctgatgatcctggcggccgtgctctccccgcccgatgtcatctccatgatgatcttcctcgtgccgctgtacggcctctacgagttctcgatcatcctggcccggtttgcgcagccgaagaacgagtag

SEQ ID NO: 6562 - protein, 238 aa, Symbiobacterium thermophilum IAM 14863
MQDKELTLVEHLTELRERIIKSLIAVAIGFFAAVFLSQPVFQHIMEQAKAEGVQLIQYNFADTFITQIKLALILGLVLAFPVVLYQVIAFILPALKPEEKRLLFIGLPFATGLFLAGWAFGYFIVVPITKEFFKSMAQASLVEVAVTPSNYLSFILSICNPLGIAFELPLVVLILARIGLVTHQFLGRVRKYAFLALMILAAVLSPPDVISMMIFLVPLYGLYEFSIILARFAQPKNE

SEQ ID NO: 6563 - DNA, 771 bp, Mannheimia succiniciproducens MBEL55E
  CDS (1)..(771): transl_table=11
atgagcagcgttgaagagtctcaacccttaattacccatttagttgaattacgtaatcgtttattacgttcaattatgttcgtattaattgtattttgcggtttagtttatttttcaaacgatatttatcatttaatcgctacgcctttattagaacaaatgccgcaaggctccacaatgattgcaaccaatgttgccgcgcccttttttaccccaatcaaattaaccggtattgccgccgtatttttgtcggtgccttatattttgtatcaggtttgggcgtttgtggcgccggctttgtatcaacatgaaaaacggttgatttatccgttattgttttccagcaccgtgctgttttatacgggcgttgcctttgcttattatgttgtatttccaatcgtatttggttttttaacaaaaaccgcaccggacggcgttgccatcgcaacggatatcagcagctatcttgattttgttctgacgttatttttagctttcggtatttgttttgaagtgccggtcgccattattctattatgctggacaggggtgacaacgcctgaagatttgaaagaaaaacgcccttatattattgtggcggcttttattatcggtatgttattaacgccgccggatattttttctcaaacattgcttgccgtacctatgtgtttattgtttgaaatcgggcttttatttgcaagattctatcgcccgaaagaggatgaaactgataacggcagttcggaattaaccaaacataaagaataa

SEQ ID NO: 6564 - protein, 256 aa, Mannheimia succiniciproducens MBEL55E
MSSVEESQPLITHLVELRNRLLRSIMFVLIVFCGLVYFSNDIYHLIATPLLEQMPQGSTMIATNVAAPFFTPIKLTGIAAVFLSVPYILYQVWAFVAPALYQHEKRLIYPLLFSSTVLFYTGVAFAYYVVFPIVFGFLTKTAPDGVAIATDISSYLDFVLTLFLAFGICFEVPVAIILLCWTGVTTPEDLKEKRPYIIVAAFIIGMLLTPPDIFSQTLLAVPMCLLFEIGLLFARFYRPKEDETDNGSSELTKHKE

SEQ ID NO: 6565 - DNA, 783 bp, Anaplasma marginale str. St. Maries
  CDS (1)..(783): transl_table=11
atgcaacaattccccgatactcttgcaattgtggtgcgtccaatggatacgggtaaaatgtcgctatcggggcatttttgcgaactccggagaagaattgtattctccgtcgtgtgttttatcggaatgtttattgtctgctatctgttctccgataagatatatgagttcctgctagtccctttggtggagcttgcaggcgataatgaagacttttctctgatctacacaggcctcaccgaagccttttttgtgtatgtgaaagtaggggcaactgctgcgctgtttttttcatttcccatttttacctggcagctttatatgttccttgctccgggcctgtacaaggaggaaaaaagggttttgctgccgtatctagtggccgcgccagttctattcgccgccggtgcggctatggtgtactactacatattcccgctggcatggaaattttttatgggtttcgagaatagagatgcctcagtcggtgtacccatagacttcatgccatctgtgagcgaatatctagatttagtattgcaactgatgtttgcctttggcatggcattccaattgcccgtaatactcaccatgatggccagagtgggcctaatctcatccaaaactttggcgggaaaacgcagggtcgcaattgtggctatattcactttggctgcaattttgacgcccccggatgtgataagccagataggtttggcaattcctatgttgctgctgtacgaagcctctatactcgcctgtaggtacattgaacgcaggtag

SEQ ID NO: 6566 - protein, 260 aa, Anaplasma marginale str. St. Maries
MQQFPDTLAIVVRPMDTGKMSLSGHFCELRRRIVFSVVCFIGMFIVCYLFSDKIYEFLLVPLVELAGDNEDFSLIYTGLTEAFFVYVKVGATAALFFSFPIFTWQLYMFLAPGLYKEEKRVLLPYLVAAPVLFAAGAAMVYYYIFPLAWKFFMGFENRDASVGVPIDFMPSVSEYLDLVLQLMFAFGMAFQLPVILTMMARVGLISSKTLAGKRRVAIVAIFTLAAILTPPDVISQIGLAIPMLLLYEASILACRYIERR

SEQ ID NO: 6567 - DNA, 789 bp, Azoarcus sp. EbN1
  CDS (1)..(789): transl_table=11
atgagcgagcttcaagaaaccttcatctcgcatctcgtcgaactgcgcgaccggctgttgcgggcgatggtcgcggtcatcgtggtgttcgtctgcctgatgccctgggcgggcgagatctacgacctgcttgccaagccgatgatgaatacgctgccagaaggcacgcacatgatcgccaccggcgtggtcacgccgtttttcgtgccggtcaaagtcaccatgatggtgtctttcgttctcgcgctgcctttcgtgctctatcaggcctgggcgttcatcgccccgggactgtatgcccacgagcgccgcctcggcctgccgctggtgctcggcagcacgctgctgtttctgctcggcatggccttctgctatttcttcgtgttcggtaccgtcttcaagttcattgccgagttcgcgccgaagagcatagtccccgcgccggatatcgaacagtatctgtcgttcgtgatgaccctgttcatcgccttcggcctgacgttcgaagttcccgtggcggtgatcctgctcgtcaaggcaggggtggtcagcatttccaagctccgcgaagtccggccctacgtcattgtcggcgcgttcgtcatcgcggcgatcatcacgcctcccgatgtggtgtcgcagttcatgctcgcagtgccgatgtgcctgctctacgaagtgggaatcctgctggcgaagttcgttagcaagcgggcgggaacggaagaacctgagcgagtcgagccggacctcgatcgcctcgaagcgccggagcccgaccggaaataa

SEQ ID NO: 6568 - protein, 262 aa, Azoarcus sp. EbN1
MSELQETFISHLVELRDRLLRAMVAVIVVFVCLMPWAGEIYDLLAKPMMNTLPEGTHMIATGVVTPFFVPVKVTMMVSFVLALPFVLYQAWAFIAPGLYAHERRLGLPLVLGSTLLFLLGMAFCYFFVFGTVFKFIAEFAPKSIVPAPDIEQYLSFVMTLFIAFGLTFEVPVAVILLVKAGVVSISKLREVRPYVIVGAFVIAAIITPPDVVSQFMLAVPMCLLYEVGILLAKFVSKRAGTEEPERVEPDLDRLEAPEPDRK

SEQ ID NO: 6569 - DNA, 939 bp, Silicibacter pomeroyi DSS-3
  CDS (1)..(939): transl_table=11
atgagcaagaccgacgagatcgacgatacctcggccccgctgatcgagcatctggccgagctgcgcacccggctgatccgggcggttctggcctttatcgtggggatcgtgctggcctttacggtggccgagccgatcctgcagttccttctggcgccgatcgaggcgacgctgcgtgacctgggcgatccctcgccgacgctgcagtacacctcgccgcaggaatacctgttcacgctgttccgcatctcgatggtgttcggttttgcgctgtcctttccggtgattggctatcagctgtggcgtttcgtggcgccggggctgtatcgctcggaaaagggggcgttcctgccgtttctggtcgcctcgcccttcatgttcctgctgggcgcgtcctttgcgcaattcgtggtcacgccgctggcgatgcagttctttctgggctttgccgacgtcagctcgatctttgccaacctgctgacgggcggtggcggcaccgtgccctcggatgtggctgtggttcccgagaccaccgatggggtcaagatcaccttcttcggcaaggtcaacgaatcgctcgatatcacgctgaaattcatcatggcttttggcctgtgcttccagttgccggtgctgctgacgctgatgggcaaggccgggctggtcagtgccgaggggctgggcagcgtgcgcaaatacgccatggtggcgatcctgaccctggccgcgctggtgaccccgcccgatgtggtgacccaggtcatcctgttcgtggtggtctatgggctttacgaggtctctatcttcctggtggcccgcgtcgagaagaagcgcgaggcgcagctgcgggccgaagggtattatgacgacgaagaggcgttcgacgacccgctgatggccgagtttgacgcggaggaagccgaggagcgcaaggaataa

SEQ ID NO: 6570 - protein, 312 aa, Silicibacter pomeroyi DSS-3
MSKTDEIDDTSAPLIEHLAELRTRLIRAVLAFIVGIVLAFTVAEPILQFLLAPIEATLRDLGDPSPTLQYTSPQEYLFTLFRISMVFGFALSFPVIGYQLWRFVAPGLYRSEKGAFLPFLVASPFMFLLGASFAQFVVTPLAMQFFLGFADVSSIFANLLTGGGGTVPSDVAVVPETTDGVKITFFGKVNESLDITLKFIMAFGLCFQLPVLLTLMGKAGLVSAEGLGSVRKYAMVAILTLAALVTPPDVVTQVILFVVVYGLYEVSIFLVARVEKKREAQLRAEGYYDDEEAFDDPLMAEFDAEEAEERKE

SEQ ID NO: 6571 - DNA, 738 bp, Campylobacter jejuni RM1221
  CDS (1)..(738): transl_table=11
atgtttgaagaattaagacctcatttaatagaacttagaaaacgcctttttataagcgttgcttgcattgtagttatgtttattgtatgttttgctctacgaagctatatcttagatattctaaaagctccacttatagctgttttacccgaagtagccaaacatgtaaatgtaattgaaatacaagaagccttatttaccgcaatgaaggttagtttttttgcagcctttatcttttctctacctgtaattttttggcaattttggaaatttgtagctccaggactttatgataatgaaaaacgccttgtggtgccttttgttagctttgcgagcattatgtttgccttgggggcttgtttttgctattttgttgtagtgcctttggcttttaaatttttgattaattttggtttaaatgaagattttaatcctgtaattaccataggaacttatgtagatttttttacaaaagttgttgtggcttttggcttagcttttgaaatgcctgtaattgcctttttctttgctaaagtcggacttatagatgatagttttttaaaacgccattttcgcatagctgttttagttatttttgttttttcagcctttatgactccacctgatgttttatctcaatttttaatggcaggaccactttgcggactttatggactttctattttaattgttcaaaaggtaaatcctgctccaaaagataaagaaagtgatgaataa

SEQ ID NO: 6572 - protein, 245 aa, Campylobacter jejuni RM1221
MFEELRPHLIELRKRLFISVACIVVMFIVCFALRSYILDILKAPLIAVLPEVAKHVNVIEIQEALFTAMKVSFFAAFIFSLPVIFWQFWKFVAPGLYDNEKRLVVPFVSFASIMFALGACFCYFVVVPLAFKFLINFGLNEDFNPVITIGTYVDFFTKVVVAFGLAFEMPVIAFFFAKVGLIDDSFLKRHFRIAVLVIFVFSAFMTPPDVLSQFLMAGPLCGLYGLSILIVQKVNPAPKDKESDE

SEQ ID NO: 6573 - DNA, 786 bp, Dehalococcoides ethenogenes 195
  CDS (1)..(786): transl_table=11
gtgagcagtaagaacgaaactcccgaaacggacgaagaagaacccccggaggaagccaaggcaaaaggcaaaatgcctatcggcgggcattttaatgagcttcgccagcgttttacccggagtatcattgccctgatagtgggtgtactggtggcctttttctttgccactcccattatcggctttttaaccgctcccggcggcccggatttcaaaccggcccagctgggggtcatggaatatgcctcggtctttttcaatgtatcactctgggcggggtttattctggcttccccttatatcctttaccagctgattgcttttattaccccggctctaaaccgcaatgaaaagaaatttatttttacggccataccggcggtcactggaatgttcctgctgggtctggcttttgcttattatgtggctttgcctcctgctttaaatatcctgctgcactggggcgatgatgtggtactcaccgtggtaggtatccgggactatatgaatgtagtcaccagaatactcattgccttgggacttatatttgaaaccccctttgttattatggtgctggccagactgggagtggtatcccccaagtggctggcttccaagcgcaaaatctggatagtcgtggcctttgtcattgccgcgcttattacacctacctttgacccggtaaaccagaccatcatggccggtccgctgattgttctttatgaaatatccatctggctgtcaaaactggtataccgcaagaagagggaagtcagcgaatcttag

SEQ ID NO: 6574 - protein, 261 aa, Dehalococcoides ethenogenes 195
MSSKNETPETDEEEPPEEAKAKGKMPIGGHFNELRQRFTRSIIALIVGVLVAFFFATPIIGFLTAPGGPDFKPAQLGVMEYASVFFNVSLWAGFILASPYILYQLIAFITPALNRNEKKFIFTAIPAVTGMFLLGLAFAYYVALPPALNILLHWGDDVVLTVVGIRDYMNVVTRILIALGLIFETPFVIMVLARLGVVSPKWLASKRKIWIVVAFVIAALITPTFDPVNQTIMAGPLIVLYEISIWLSKLVYRKKREVSES

SEQ ID NO: 6575 - DNA, 753 bp, Ehrlichia ruminantium str. Welgevonden
  CDS (1)..(753): transl_table=11
atgaaatctacaaatggtgaaatgcccttttttaagcattttgaggaattaagatataggatattcttttgttttgcatttttttgtattatgtttggagtatgctattttttttcagaaaaaatatataatttcttattaattcctttaatagaattagaaggttctaattctgagttttctttaatatatactgatttaacagaagctttttttgtatatttaaaagttgctactatggcagctttattatgttcttgccctgtttttatatggcaattatatatgtttttagctcctggtttatacaaaaaggaaaagttaattcttttgccttacttgatttcagcattactgttgtttattgctggagcagcaatggtatactattatatattccctttagcttggaaattttttattgcctttgaaaatagagatgcttcaatgggtgtacctatagaatttatgccatcagttagtgaatatttagatttggtattacaattgatgtttgcatttggagtagcatttcaaatacctatattcttgacgttaatgtctaggattggtatcttaccagcaagagttttagcgaagaaaagaagatttgcaatagtgattatttttattattgctgctgtattaactccacctgatgtattaagtcaagtaggtttggctgtgccaatgctattgttgtacgaagtctcaatattagcatgtagatatattgagcaaaataataagtag

SEQ ID NO: 6576 - protein, 250 aa, Ehrlichia ruminantium str. Welgevonden
MKSTNGEMPFFKHFEELRYRIFFCFAFFCIMFGVCYFFSEKIYNFLLIPLIELEGSNSEFSLIYTDLTEAFFVYLKVATMAALLCSCPVFIWQLYMFLAPGLYKKEKLILLPYLISALLLFIAGAAMVYYYIFPLAWKFFIAFENRDASMGVPIEFMPSVSEYLDLVLQLMFAFGVAFQIPIFLTLMSRIGILPARVLAKKRRFAIVIIFIIAAVLTPPDVLSQVGLAVPMLLLYEVSILACRYIEQNNK

SEQ ID NO: 6577 - DNA, 795 bp, Bacteroides fragilis NCTC 9343
  CDS (1)..(795): transl_table=11
atggcagaaattaaagaactgactttttgggatcacctggatgaactgcgccgggtgctgtttcgaattataggtgtatggtttgttttggctgtaggctatttcattgctatgccctatctgttcgaccatgtcattctggctccctgccacaacgatttcatcttttaccatcttctgcgggacatcggacaggcattcgaccttaccgatgacttctttacccgtgagtttaaagtcaagctggtaaatatcaatctggcagcacctttttttatccacatgtccaccgctttctggatgtctgtagtcactgccacaccttatttgtttttcgagatatggcgtttcatccgtcctgccctttaccctaatgaacggaaaggagtccgcaaagccctgaccatcggcacggtcatgttttttatcggagtccttttaggttattttatggtctatccgctcacccttcgttttctctctacctatcaactcagcgcagaaatagagaatcagatctccctgaactcttacatcgacaattttatgatgctggtgctctgcatggggctggctttcgaactacctttggtaacctggttgctttccttgcttggattggtaaacaaatcattcttacgaaaataccggagacatgccattgtcctgattgtcatcgctgctgctgtcattactccaacaggagaccctttcacactcagcatcgtagctattcccctctatctgctttatgaaatgagcatattgatgattaaagacaaaaaccgctcgtag

SEQ ID NO: 6578 - protein, 264 aa, Bacteroides fragilis NCTC 9343
MAEIKELTFWDHLDELRRVLFRIIGVWFVLAVGYFIAMPYLFDHVILAPCHNDFIFYHLLRDIGQAFDLTDDFFTREFKVKLVNINLAAPFFIHMSTAFWMSVVTATPYLFFEIWRFIRPALYPNERKGVRKALTIGTVMFFIGVLLGYFMVYPLTLRFLSTYQLSAEIENQISLNSYIDNFMMLVLCMGLAFELPLVTWLLSLLGLVNKSFLRKYRRHAIVLIVIAAAVITPTGDPFTLSIVAIPLYLLYEMSILMIKDKNRS

SEQ ID NO: 6579 - DNA, 768 bp, Colwellia psychrerythraea 34H
  CDS (1)..(768): transl_table=11
atgagtactcccccaacaccagttgccagcctttttgatcatcttttagaactacgtaatcgtttattgcgatcaattcttggagtattaatcgttttttgttgcttagtctactttgcacaagatatatatcaatacgtggctcagccattattagctaccatgccagaagggtcacaaatgatagcgaccgatgtcgcttcaccattttttgcaccttttaaattaactttggttttatccctatttattgcgatgccatttgttttatatcaagtgtggtcatttgttgcgcctggtttgtacagtaatgaaaagcgcatgattgccccgttaatgttcggttcaacgttgctgttttatagtggtattgcctttgcctattttcttgtatttccggtagtatttgccttttttacttcagtagcaccagaaggcgttgttattgcgactgatatcagtagttatctagatttcatcttaaaactgttttttgcttttggtgccgcatttgaaattcctattgccattatcttaatgtgttggacaggtatgacgacacctgatagcttaagagaaaagcgaccttatgttgtagtaggtgcatttgtcattggtatgttattgacaccacctgatattatttcacaaactatgttggccgtgccaatgctgattttatttgaagtcggtattattattgcttcgttttatcataaagaagaagatgaagacgaatcgaataatataaaggaaaatgacaaatga

SEQ ID NO: 6580 - protein, 255 aa, Colwellia psychrerythraea 34H
MSTPPTPVASLFDHLLELRNRLLRSILGVLIVFCCLVYFAQDIYQYVAQPLLATMPEGSQMIATDVASPFFAPFKLTLVLSLFIAMPFVLYQVWSFVAPGLYSNEKRMIAPLMFGSTLLFYSGIAFAYFLVFPVVFAFFTSVAPEGVVIATDISSYLDFILKLFFAFGAAFEIPIAIILMCWTGMTTPDSLREKRPYVVVGAFVIGMLLTPPDIISQTMLAVPMLILFEVGIIIASFYHKEEDEDESNNIKENDK

SEQ ID NO: 6581 - DNA, 828 bp, Dechloromonas aromatica RCB
  CDS (1)..(828): transl_table=11
atgagcgaagcacccgaagactcgtttatctcgcatctggttgaactgcgcgaccgcctgttgcgcagcctgatcgccattgcagtcgttcttggtattctgtgtatttacccagggccgggcgaaatctacgacatccttgccgcaccgttaaccaaggccttgccggaaggcaccaagatggtcgccatcggcgtcatcacgccgttcatggtgccgctaaaggtgacggcgatggtcgctttcataatggcgctgccgttcattctttaccaggcctgggccttcatcgctccgggtctctatgctcacgaaaagcgcctgggcattccgctgatcatttcgagcacgctgttgtttgtggccggtatgtcattctgctacttcttcgtcttcggacaggtattcagcttcattaacagctttgccccgaagagcattacgcctgcaccagatatcgaggcctacctgtccttcgtgatgaccatgttcctggccttcggtattgcctttgaggtgccagttgccttggttgtgctggtcaagctgggtgtggtttcggtcgagaaattgaaggagtggcgctcctactttatcgtcggtgcctttatcgttgctgccgtggtgacgccaccggatgtcgtttcgcaacttgcactggccatcccgatgtgcctgctttacgaactgggaatcctcgccgcacgctttgtgtcggcacctcgaccggtcgaggctccggcagaggtgactccggaaaagtcagccgaaatggatagcgagatggccaaggctgaagaggacttccgcaagctgtctgagcactga

SEQ ID NO: 6582 - protein, 275 aa, Dechloromonas aromatica RCB
MSEAPEDSFISHLVELRDRLLRSLIAIAVVLGILCIYPGPGEIYDILAAPLTKALPEGTKMVAIGVITPFMVPLKVTAMVAFIMALPFILYQAWAFIAPGLYAHEKRLGIPLIISSTLLFVAGMSFCYFFVFGQVFSFINSFAPKSITPAPDIEAYLSFVMTMFLAFGIAFEVPVALVVLVKLGVVSVEKLKEWRSYFIVGAFIVAAVVTPPDVVSQLALAIPMCLLYELGILAARFVSAPRPVEAPAEVTPEKSAEMDSEMAKAEEDFRKLSEH

SEQ ID NO: 6583 - DNA, 789 bp, Ralstonia eutropha JMP134
  CDS (1)..(789): transl_table=11
atgagcgacaaccggtccaacgatcctcaagacgaatcgcagcaggaaaccttcatttcgcacctgatcgagctgcgcgagcggctggtcaaggcggtcgccggcatcatcctggtgttcgtggggctggtgtactgggcgcccgtcatcttcaatctgtttgcgcggccgctgatggaatcgctgcccaagggcggcaagatgatcgtgaccgatgtgaccggctccttctttgtgccgatgaaggtcacgctgctggtcgcgttcctgattgcgctgccgtgggtgctgtaccaagtctggcagttcgtcgcaccgggcctgtaccagcatgagaagcggctgatcgtgccgctggttagcagcagctacgtgctgttcctgtgcggcgtcgcattcgcgtacttcctggtcttcccgaccgtgttccatttcatggcgcactacaacgcgccgctgggcgcggacatgtcgacggacatcgacaagtacctgagcttcgcgatgaccatgttcctcgcgttcggcatcactttcgaagtgccggtggtggtgatcgtgctggtgcgctttggggtggtcgagctggacaagctcaagcagattcgcccgtatgtgattgtcggcgccttcatcattgcggccgttgtcacgccgccggacgtgctttcccagctgctcctcgcactgccgctgatcgccctgtatgaactcgggttgctcatggcgcgctttgtcgggcgtccggaagccagcgcggatgccgctggcgaaactcaggcggattga

SEQ ID NO: 6584 - protein, 262 aa, Ralstonia eutropha JMP134
MSDNRSNDPQDESQQETFISHLIELRERLVKAVAGIILVFVGLVYWAPVIFNLFARPLMESLPKGGKMIVTDVTGSFFVPMKVTLLVAFLIALPWVLYQVWQFVAPGLYQHEKRLIVPLVSSSYVLFLCGVAFAYFLVFPTVFHFMAHYNAPLGADMSTDIDKYLSFAMTMFLAFGITFEVPVVVIVLVRFGVVELDKLKQIRPYVIVGAFIIAAVVTPPDVLSQLLLALPLIALYELGLLMARFVGRPEASADAAGETQAD

SEQ ID NO: 6585 - DNA, 810 bp, Thiobacillus denitrificans ATCC 25259
  CDS (1)..(810): transl_table=11
atgagcgcgcagggagataccttcatttcgcatctgatcgagatgcgcgatcggctgttgcgcgcggtcattgcgatcgtcgtcgtcttcatcgccttgttcccgtgggcccaggacctgtatgccgtgctggcgcaaccgcttctgtcggccctccccgagggcgggcagatgatcgcgaccgaggttacgacgccgttcttcgtgccggtgaaggtcacgctcatgacggcgttcctgttggcgatgccgtgggtgttctatcagatatgggccttcgtcgcgcccggtctgtatcagcacgaaaagcgtatcggcatcccgctggtggtggccagcgtgctgctgttcctgctcggcatggccttcgcgtatttccttgtctttcccgtggtgttcggcttcatcgtcgggatcgcgccggccggcgttgcggtgatgaccgacatcggcaaatacctcgatttcgtgctcacgctgttcatggccttcgggatcaccttcgaggtgcccgtggcggtcgtgctgctggtcaagatgggcatggtgtcggtcgcgaagctgcgggagatccgtccctacgtgatcgtcggcgccttcgttatcggcgcgatcttcaccccgcctgacgtgatctctcagttcatgctcgcagtgcccgtatggcttttgtatgaactcggcattctggtcgcggcgctgattaccaaacctcagccggaagccgagtccgattacacaccgctgtcggaatccgcgctcgacgaagagctcgaccggatcgaacgcgagtcgaccgacaacaagtag

SEQ ID NO: 6586 - protein, 269 aa, Thiobacillus denitrificans ATCC 25259
MSAQGDTFISHLIEMRDRLLRAVIAIVVVFIALFPWAQDLYAVLAQPLLSALPEGGQMIATEVTTPFFVPVKVTLMTAFLLAMPWVFYQIWAFVAPGLYQHEKRIGIPLVVASVLLFLLGMAFAYFLVFPVVFGFIVGIAPAGVAVMTDIGKYLDFVLTLFMAFGITFEVPVAVVLLVKMGMVSVAKLREIRPYVIVGAFVIGAIFTPPDVISQFMLAVPVWLLYELGILVAALITKPQPEAESDYTPLSESALDEELDRIERESTDNK

SEQ ID NO: 6587 - DNA, 795 bp, Anabaena variabilis ATCC 29413
  CDS (1)..(795): transl_table=11
atgacaccctcacaagaagtagatacaagaaccactcctgagattgatacagaaggatacggcaactcagatattgattctctcgatgagttgcctggtgaagtcgaaatgtctctattcgaccacctagaagaattaagacagcgcatcttttattcactgattgccgtagcagtgggtgtagttggctgcttcttcgccgtcaagccaattgttcaattactagaagtcccagctcaaggcgttaaatttctccagctagcccccggagaatatttctttgtttctctcaaagttgcaggctacactggcttgttactttctagtcctttcattctctaccaaattattttgtttgttctccctggattaactcggcgcgaacgtggtctacttgggcctattgttttagggtcaagtgtgctgtttgccgccggtttagtctttgcttatttacttttgattcccgccgctttgaattttttcatcagttacggcgcggatgtagtcgaacaactgtggtctatcgacaaatattttgaatttgtactattgcttttatttagtactgggttggctttccaagttcccatcatccaacttttactagctaatttaggtatcgtttcatcccaaagaatgatttctggctggcgatttgtaattatggcagccgtagttttaggtgctgtacttacaccttccacagaccccctaactcaaagtcttttggcaggcgcagtacttaccctttactttggtggtattggtttagtgaagctcacaggtaaatga

SEQ ID NO: 6588 - protein, 264 aa, Anabaena variabilis ATCC 29413
MTPSQEVDTRTTPEIDTEGYGNSDIDSLDELPGEVEMSLFDHLEELRQRIFYSLIAVAVGVVGCFFAVKPIVQLLEVPAQGVKFLQLAPGEYFFVSLKVAGYTGLLLSSPFILYQIILFVLPGLTRRERGLLGPIVLGSSVLFAAGLVFAYLLLIPAALNFFISYGADVVEQLWSIDKYFEFVLLLLFSTGLAFQVPIIQLLLANLGIVSSQRMISGWRFVIMAAVVLGAVLTPSTDPLTQSLLAGAVLTLYFGGIGLVKLTGK

SEQ ID NO: 6589 - DNA, 795 bp, Pseudomonas fluorescens PfO-1
  CDS (1)..(795): transl_table=11
atgacaggccctagcctccccgaaaacgaccagcacatgccgctggtttcgcacctcaccgagttgcgcacccgcctgctgcgttgcgtggcggcgatcttcatcatctttgccgggctgtttgccttcacccagcagatctacaccttcgtctcgacgccgctgcgcgaatacctgccggccggcgcgacgatgatcgccaccgacgtgtcgtcgccgttcctgacgccgctgaaactgacgatgatggtctcactgttcctggcgattccggtgatcctgcatcagatctggggcttcatcgcaccgggtctgtacaagcacgagaagcgtgtcgcagtgccgttgctgatctccagcatcctgctgttctacaccggcatggcgttcgcctacttcttcgtgttcccgctgatcttcaagttcttcgcctcggccaccccggccggcgtggaaatgatgaccgacatcaccagttacctcgatttcgtcatgacgctgttcttcgccttcggcgtggcgttcgaaatcccggtggccgtggtgctgctggtgtggatcggcgtggtcgacgtcaaatacctgaagaagatccgtccgtacgtgatcatcggctgcttcgtggtcggcatgatcctgaccccgccggacatcttctcccagaccctgctggccgtgccgatgtggatgctgttcgaagtcggcatcctcttcggcagtctggtcagcaagcgcgagcgcccggaagaaaccgccgacgatcacaacgaccagccgccagcgactcagccatga

SEQ ID NO: 6590 - protein, 264 aa, Pseudomonas fluorescens PfO-1
MTGPSLPENDQHMPLVSHLTELRTRLLRCVAAIFIIFAGLFAFTQQIYTFVSTPLREYLPAGATMIATDVSSPFLTPLKLTMMVSLFLAIPVILHQIWGFIAPGLYKHEKRVAVPLLISSILLFYTGMAFAYFFVFPLIFKFFASATPAGVEMMTDITSYLDFVMTLFFAFGVAFEIPVAVVLLVWIGVVDVKYLKKIRPYVIIGCFVVGMILTPPDIFSQTLLAVPMWMLFEVGILFGSLVSKRERPEETADDHNDQPPATQP

SEQ ID NO: 6591 - DNA, 870 bp, Rhodobacter sphaeroides 2.4.1
  CDS (1)..(870): transl_table=11
atgagcctcgacagccgagacgacatcgacagttccagtgctccgctgatcgagcatctggcagagttgcggaaccggatcctgatctcgctcgcggcctttctggtcgctatgctggcgtcgttcacggtctggaacccgatcttcaacttcctcacccacccgatctgcgacgcgctgaacgcgcgggggcaggactgctcgctgatcctcatcaagctgcaggaaggcttcttcgtggccatccgcatctcggtgatggggggcatcatcctctccttcccgatcatcgcatggcagatgtggcgtttcgtggcgccggggctctaccgcaacgaaaaggcggccttcctgccgttcatcgtcgcctcgccgctcatgttcctgctgggcggcatcttcgccttctacatcgtgctgcccatcgccttcgacttcttcctgggcttccagcagttcatgaccgagcagccgggcgctgtgcgcgaagacggcacgatgccgctcgcaggcgtggtgttccaggggtcgatggagcagtatctggcgctgaccacgaccttcatcctggccttcggtctctgcttccagcttccggtcctgctcacgctgatgggcaaggcggggctcgtgacggcgcggggcctctcctcgatgcgcaaatatgccatcgtgctgattctgatcgtggcggccttcgcgacgccgcccgacatgatgtcccagatgatcctcttcggcgcggtctatccgctctacgagatctcgatcctgctcatccgccggatcgagcggaagcgcgaggccgagctgcgggcgcaggggctgtggttcgaggacgagaacgaggaagaggacggcaaggcatga

SEQ ID NO: 6592 - protein, 289 aa, Rhodobacter sphaeroides 2.4.1
MSLDSRDDIDSSSAPLIEHLAELRNRILISLAAFLVAMLASFTVWNPIFNFLTHPICDALNARGQDCSLILIKLQEGFFVAIRISVMGGIILSFPIIAWQMWRFVAPGLYRNEKAAFLPFIVASPLMFLLGGIFAFYIVLPIAFDFFLGFQQFMTEQPGAVREDGTMPLAGVVFQGSMEQYLALTTTFILAFGLCFQLPVLLTLMGKAGLVTARGLSSMRKYAIVLILIVAAFATPPDMMSQMILFGAVYPLYEISILLIRRIERKREAELRAQGLWFEDENEEEDGKA

SEQ ID NO: 6593 - DNA, 732 bp, Carboxydothermus hydrogenoformans Z-2901
  CDS (1)..(732): transl_table=11
atggaagataaaccgatgacgttgtttgaacacttagaagctttacggaaagtaattattattagcgttattgccatagttattggctcaataattgcttataattatgtcgattattttctaaatatcttactccagccggttaccgctcttaaaatgaagttagtttttatcaatgtcaccgaagcatttatgacaaaactgaaaattgccataatactgggaattatacttgcctccccgataattttgtggcaaatctggagtttcgtcgctcccgggttgaaaccggcggaaagaaagtttatcctaaggatgattccagtaataattattttattcgtcgccggtatcgtttttgccttctttacagtctttcaaattgccacccgatttcttttacaatttggcggcgatattatgagtccgatgataaccatcggcaagtatatctcttttgctttaaattttttgataccttttggtctggtttttgagctgccggtagttgtttatatcctggccaagctaaatattatctcccatgaattcttggtaaaaaaccggaaatacgccttactggtggtatttatcctggccgccgccctgactcccggccccgatgtcataagccagctcttaatggctgctcctcttttaatcctctatgaagtaagcatatttatcgctaaatttataaaaccaaaagaattttccggagaacgcaagtaa

SEQ ID NO: 6594 - protein, 243 aa, Carboxydothermus hydrogenoformans Z-2901
MEDKPMTLFEHLEALRKVIIISVIAIVIGSIIAYNYVDYFLNILLQPVTALKMKLVFINVTEAFMTKLKIAIILGIILASPIILWQIWSFVAPGLKPAERKFILRMIPVIIILFVAGIVFAFFTVFQIATRFLLQFGGDIMSPMITIGKYISFALNFLIPFGLVFELPVVVYILAKLNIISHEFLVKNRKYALLVVFILAAALTPGPDVISQLLMAAPLLILYEVSIFIAKFIKPKEFSGERK

SEQ ID NO: 6595 - DNA, 789 bp, Burkholderia sp. 383
  CDS (1)..(789): transl_table=11
gtgagcgacccccagcagaacccgggcgacgccccggaagaaaccttcatttcccatctcgtcgagcttcgcgatcgcatcattcgcgcgggcgcggctgtgatcgtcgtgttcctcgggctcgtctactgggcgcccgacatcttccggctgctcgcgcggccgctgatggagaacctgccgaaggacggcaagatgatcgtcaccgacgtcaccggctcgttcttcgtgccgatgaaggtcacgatgctcgtcgcgctcgtgatcgcgctgccgatcgtgctgtaccagatctgggcgttcgtcgcgccggggctgtaccagcacgagaagaagctcgtcgcgccgctcgtaggcagcagctacttcctgttcctgtgcgggatggcgttcgcgtacttcctcgtgttcccgacgatcttccgcgtgatggcgcactacaacgcgccgctcggggcggaaatgaccaccgacatcgacaactacctgagcttcgtgctcgggatgttcatcgcgttcggggtcacgttcgaggtgccgatcgtcgtcgtgctgctcgtccggatgggcgtgctgtcgctgaagaagctgaaggagatgcggccgtacgtgatcgtcggcgcgttcgtcgtcgcggcggtcgtcacgccgccggacgtgttctcgcaactgatgcttgcactgccgctggtcgtgctgttcgagatcgggctgctggctgcgcggttcttcgtgccgaagaagccggccgaggaaggcgaggcggagaacggcgaagccgccagctga

SEQ ID NO: 6596 - protein, 262 aa, Burkholderia sp. 383
MSDPQQNPGDAPEETFISHLVELRDRIIRAGAAVIVVFLGLVYWAPDIFRLLARPLMENLPKDGKMIVTDVTGSFFVPMKVTMLVALVIALPIVLYQIWAFVAPGLYQHEKKLVAPLVGSSYFLFLCGMAFAYFLVFPTIFRVMAHYNAPLGAEMTTDIDNYLSFVLGMFIAFGVTFEVPIVVVLLVRMGVLSLKKLKEMRPYVIVGAFVVAAVVTPPDVFSQLMLALPLVVLFEIGLLAARFFVPKKPAEEGEAENGEAAS

SEQ ID NO: 6597 - DNA, 804 bp, Synechococcus sp. CC9605
  CDS (1)..(804): transl_table=11
gtgtctgagcgccccgaaggtcccccagctctgcaaccaccaccacccattcgcattgggaggccacctggcgatgccgatctacccaatgaggtggagatgcctctggtggatcaccttgaggaactgcgtcaacgggttctgcgcagcttgctggccgttgtcgttgcagcgctgacctgcctgctgggggttaaaccgctggtgcgcctgctggaagcgccagccagcggaattcattttcttcaactcgcgccgggtgagtttctgttcgtctcgctgaaggtggccggctacgccggcctcaccctggccctgccctacgtgctgttccagatcctggccttcgtgctgccgggcctgacgatccgcgaacgacgcctgattgcccctgccgtcgccggctccgcagtgctgttcatgacgggcctggcctttgcctggtgggccttagttccagccgccctgcgttttctggtgagttacggcgccgatgtggtggagccgctctggtcgatcgagcgctacctggattttgttctgctgctgatgctggccaccgggctggcatttcagctccccgtgctgcagctgctcctcggggccctggggctggtgcgctggaggccgatgcttggggcctggcgctgggttgtgttgggctcagccctggctggcgctgtgctgacgccatccaccgatccgatcacgatgttgctgctggctggagccatcacggcactgttcctgatcggagtcggcctggtggccctgaccgaatccttcagaccagaaactctttga

SEQ ID NO: 6598 - protein, 267 aa, Synechococcus sp. CC9605
MSERPEGPPALQPPPPIRIGRPPGDADLPNEVEMPLVDHLEELRQRVLRSLLAVVVAALTCLLGVKPLVRLLEAPASGIHFLQLAPGEFLFVSLKVAGYAGLTLALPYVLFQILAFVLPGLTIRERRLIAPAVAGSAVLFMTGLAFAWWALVPAALRFLVSYGADVVEPLWSIERYLDFVLLLMLATGLAFQLPVLQLLLGALGLVRWRPMLGAWRWVVLGSALAGAVLTPSTDPITMLLLAGAITALFLIGVGLVALTESFRPETL

SEQ ID NO: 6599 - DNA, 1107 bp, Desulfovibrio desulfuricans G20
  CDS (1)..(1107): transl_table=11
atgagtgacgagctgaaacgcgacgggcagaccggagattccgaagagcacgaaactgcggcaaacggagaaaccggaacttctaccgccgatgccgggcagggcgacacaaacgaacagcccgcagcggaacagcaggatacagcagcagattccacccccggggacggaactgatgctgataccggcgatgccgcagcagatgacccgtctgccgaatccgccgacgataacaataaagccggggcggaaaacgccccggctctttctgaatccgttcctcccgtacctgccgtcaaccgcgtgaccgaggcggcggcagatgaggaagaggatgaagacgaacggcccatgacgctgcttgaacatctggatgagctgcggttccggcttgtgcgctgctgtattgccgtgggtataggctttctggcctgttacggttttgcagaacagcttttcggctatctggtggctccgctgctggcagtaatgcccgaaacaagcactttgattttcaccgagctgcccgaagcgttcttcacctatcttaaaatatccatcgttgccggtatgttcctgaccagcccgtacatattttaccagatatgggcttttatcgctccaggactgtacgacgaggaaaaaaaatacatcattcccatggcaggtgtttccgcactgttctttgcgtcgggcgcctgcttcggctattttattgttttcccgttcgctttcgactttttcatgagctttaacaacgagaccattcaggccatgcccaagcttggtgaatatctcggtttttcgctcaagttgcttatagcgttcggcctgattttcgaaatgcctctgtttgcctttttcggcgcacggataggcattcttaccgctgcagccatgcgcaaagcccgcaaagtggctgtgctgtgcttctttattgtggcggccattcttaccccgcccgatgtcatctcgcagctgcttatggccggtccgctgctgttgctgtatgaagtaagcatctacgtggcacagattttcggccggtccgccaaagccggcgggcaggatgaagatgaaaacgatgagcaggaagaaacagcgtag

SEQ ID NO: 6600 - protein, 368 aa, Desulfovibrio desulfuricans G20
MSDELKRDGQTGDSEEHETAANGETGTSTADAGQGDTNEQPAAEQQDTAADSTPGDGTDADTGDAAADDPSAESADDNNKAGAENAPALSESVPPVPAVNRVTEAAADEEEDEDERPMTLLEHLDELRFRLVRCCIAVGIGFLACYGFAEQLFGYLVAPLLAVMPETSTLIFTELPEAFFTYLKISIVAGMFLTSPYIFYQIWAFIAPGLYDEEKKYIIPMAGVSALFFASGACFGYFIVFPFAFDFFMSFNNETIQAMPKLGEYLGFSLKLLIAFGLIFEMPLFAFFGARIGILTAAAMRKARKVAVLCFFIVAAILTPPDVISQLLMAGPLLLLYEVSIYVAQIFGRSAKAGGQDEDENDEQEETA

SEQ ID NO: 6601 - DNA, 972 bp, Rhodospirillum rubrum ATCC 11170
  CDS (1)..(972): transl_table=11
atggctccggcggacgcgacgcgcgacgaagattccgaccttgaagacaagaaaatgccgctgatcgatcatctgatcgaactgcgcagccgtcttttatggtcgacggtgttcttccttgtcgcctttttcgcctgtttcgcctatgcccaggaaatctataatattctggtcttgccgcttgcccgggtgatggagcgggtgggcgggtcgcagcgcatgatctataccgcgctgaccgaggcgtttttcacctatgtcaaggttggcgcctttggcgcgatcgtgctcagctttccgctgatcgccacccagatctggatgttcgtggctcccggattgtaccgccacgagaagcgcgcctttctgccgttcctcatcgtcagcccgatgttgttcatccttggggcggcgatggtttattatcttgttatgccaatggcttggtcgttcttgctcggctttcagacgacgcgcgagcaaaccgttttgccgatccagctggaagccaaggtcggcgaatatcttggcttggtgatgaagctgatcctggctttcggcttcagcttccagatgcccgtcgccctgacgctgatggcccgggttgggctggtcacctcgcgcgggctggccaaggcgcgcaaatacgccatcgtcgccgttttcgccggcgccgccgtcatcaccccccccgacatcatgagccaggtgatgctggccattccgctgctggtcctctacgagctttcgatcgtcgcggcgcggatggtggaaaagagcaaggggatcgaagacgacgatcttgagaatctcgacgacgacgagccccctccggcggccgcagcgccgtcgaccgcccataagcggggcgggaccacggccttggccgctccgcttgcccgcgatgaagaggccggggccgacggcgatccggggcgcttcgaagagaccgactggaatcatgggcattag

SEQ ID NO: 6602 - protein, 323 aa, Rhodospirillum rubrum ATCC 11170
MAPADATRDEDSDLEDKKMPLIDHLIELRSRLLWSTVFFLVAFFACFAYAQEIYNILVLPLARVMERVGGSQRMIYTALTEAFFTYVKVGAFGAIVLSFPLIATQIWMFVAPGLYRHEKRAFLPFLIVSPMLFILGAAMVYYLVMPMAWSFLLGFQTTREQTVLPIQLEAKVGEYLGLVMKLILAFGFSFQMPVALTLMARVGLVTSRGLAKARKYAIVAVFAGAAVITPPDIMSQVMLAIPLLVLYELSIVAARMVEKSKGIEDDDLENLDDDEPPPAAAAPSTAHKRGGTTALAAPLARDEEAGADGDPGRFEETDWNHGH

SEQ ID NO: 6603 - DNA, 744 bp, Moorella thermoacetica ATCC 39073
  CDS (1)..(744): transl_table=11
atggaagataagtccatgaccctgaccgaacacctggaagccctacgccgggtactcctggtatccattattgccctggttatagctacaatcgccgtctacttcggtttccgggaacaactcctagctttaatcctgcgtcccatgaaggatctgggtatcaagccggtctttattaccccgtgggaggcctttttcacgacgataaagatttgtttcgtagcagccatttttctggccctgccggttatcctctgggaggtctggagtttcgtcctgccggccctgcacagccatgaaagacggctggtatatatactcatgccggcttccataatcctcttcgtgggcggggtagtctttggttacctggttgttttcccggcagcggtacgtttcttgctggtaaccgccagcgaaggttttatgccctttattaccatctccaggtatttcgggttcctgagtatgtttgtccttcccttcggcgcggtttttcaattgcccctgatcattatgctcctgactcacctgggcctggtgacccccaggtttctggctaaaaaccgcaaatacgccgttctaataatattcattgtagctgccgttgtgaccccgacaccggatatggtttcccagaccctcatggcgctgcccatggtagttctttatgaagccagtatctggatatcttacctggttcgccgcaagcgggaagaaaaggtccggcaagaaggtatttaa

SEQ ID NO: 6604 - protein, 247 aa, Moorella thermoacetica ATCC 39073
MEDKSMTLTEHLEALRRVLLVSIIALVIATIAVYFGFREQLLALILRPMKDLGIKPVFITPWEAFFTTIKICFVAAIFLALPVILWEVWSFVLPALHSHERRLVYILMPASIILFVGGVVFGYLVVFPAAVRFLLVTASEGFMPFITISRYFGFLSMFVLPFGAVFQLPLIIMLLTHLGLVTPRFLAKNRKYAVLIIFIVAAVVTPTPDMVSQTLMALPMVVLYEASIWISYLVRRKREEKVRQEGI

SEQ ID NO: 6605 - DNA, 783 bp, Burkholderia thailandensis E264
  CDS (1)..(783): transl_table=11
gtgagcgacccccagcacaatccggacgaaggtccggaagaaaccttcatctcccatctcgtcgagttgcgcgaccggatcattcgggcaggcacggccgtgatcgtcgtgttcctcgggctcgtctactgggcaccggacatcttccggctgctcgcgcgaccgctgatggagaacctgccgaaaggcggcaagatgatcgtgaccgacgtcacgggctcgttcttcgtgccgatgaaggtgacgatgctcgttgcgctcgtgatcgcgctgccggtcgtgctgtaccaaatctgggcgttcgtcgcgccggggctctatcagcacgaaaagaagctcgtcgcgccgcttgtcggcagcagctacgtgctgtttctctgcgggatggcgttcgcgtacttcctcgtgtttccgacgattttccgcgtgatggcgcactacaacgcgccgctcggtgccgagatgtcgaccgatatcgacaattatctgagcttcgtgctcgggatgttcgtcgcgttcggggtcacgttcgaggtgccgatcgtcgtcgtgctgctcgtccggatgggcgtgctgacggtgaagaagctcaaggagattcggccgtacgtgatcgtcggcgcgttcgtcgtcgcggccgtcgtgacgccgcccgacgtgttctcgcagttgatgctcgcgctgccgctcgtgctgctgtacgaggccgggatcatcgcggcgcggctgttcgtgaagccgcccgcgaaggaagaggacgagagcgaggccgcggcgaattga

SEQ ID NO: 6606 - protein, 260 aa, Burkholderia thailandensis E264
MSDPQHNPDEGPEETFISHLVELRDRIIRAGTAVIVVFLGLVYWAPDIFRLLARPLMENLPKGGKMIVTDVTGSFFVPMKVTMLVALVIALPVVLYQIWAFVAPGLYQHEKKLVAPLVGSSYVLFLCGMAFAYFLVFPTIFRVMAHYNAPLGAEMSTDIDNYLSFVLGMFVAFGVTFEVPIVVVLLVRMGVLTVKKLKEIRPYVIVGAFVVAAVVTPPDVFSQLMLALPLVLLYEAGIIAARLFVKPPAKEEDESEAAAN

SEQ ID NO: 6607 - DNA, 834 bp, Syntrophus aciditrophicus SB
  CDS (1)..(834): transl_table=11
atgcccattcaggaattgcccatgactctacctgctgatgaaaaactgcccttgacgtcccatctggaggaattgcgaaaacgtctcattcatgttttcattgccctcggaatcggcttcactctctgctacatgttcaaagactggcttttttttgtggtgacccgtcccctgatcgcagtcatgcccaaaaacagtttcatgatcttcacctccctgccggaggccttttttacctatatgaagatctctttcttttcatcgctgatcctgacgagtccttacattctttatgagatctggaaatttgtttcacccggcctctatccgaaagaaaagagatacgttcttccctttgtctttttttcgaccctgctgtttgccggtggcgtccttttcggatactttatcgcgttgccgccagcttttaaattcttcgtctccttttcctccgatttcctcaaacccatggtctccatgcgggaatatctcagtcttgccctgaaatttctgctggccttcggactctgctttgagttgccggtctttgtttttttcctgaccaaggtcggcgtcatcaacgcccggatgctttcctcacagcgacgctatgccatcctgatcatcttcattgtcgcggccgtgctgacgccgtcaccggacgcggtcagccagatcctcatggcccttcccctcatggttctctatgaagtcagcatcctggtctcccggttagcggggcgcaagcgtcgcggcactctggaggaaaccggcaacgagatcgaccgaaaagaagaagaggaagacatcccggaaacgcccaaggctgaataa

SEQ ID NO: 6608 - protein, 277 aa, Syntrophus aciditrophicus SB
MPIQELPMTLPADEKLPLTSHLEELRKRLIHVFIALGIGFTLCYMFKDWLFFVVTRPLIAVMPKNSFMIFTSLPEAFFTYMKISFFSSLILTSPYILYEIWKFVSPGLYPKEKRYVLPFVFFSTLLFAGGVLFGYFIALPPAFKFFVSFSSDFLKPMVSMREYLSLALKFLLAFGLCFELPVFVFFLTKVGVINARMLSSQRRYAILIIFIVAAVLTPSPDAVSQILMALPLMVLYEVSILVSRLAGRKRRGTLEETGNEIDRKEEEEDIPETPKAE

SEQ ID NO: 6609 - DNA, 1095 bp, Frankia sp. CcI3
  CDS (1)..(1095): transl_table=11
gtgccagggttgcccacgccgcgaaggctcgtcgcctcggtgaactaccgccgcacgcgcactgtcgaggacagtcgcatgccgctcaccgagcatctgcgtgagctgcgcaaccgcgtcgccatcgcgctcctcgcgttcgcgatcgccggtgtcgtctgtttcatcttcgagccgcgcatcttcgactggctcaaggcgccgtactgcgacctgccggcgagcaagcggttcagcccggacggcctggcggcgaacgactgcaccctgtacttcttcggcatcctcgacgcgttcactatccgcctgaagatctccatgatcgccgcggtggtggtctcctcgccggtgtggctgtaccaactctggtccttcatcacccctggtctgcaccgtcatgagcggcgctggtcgttgaccttcgtcggtgtctccctcgtcctgttcgccaccggtgcggtcttcgcctacctgacgttgtcgaccgggctgggcctgctgctcggcttcggcggcaacgggctggtcagcgtcctggacggcaaccggtacctcagctacgtccaggcgatgctgctgatcttcggactgtcgttcgaggttccgctgctcgtcatgatgctgaatctggccgggatcgtcagcaccgccaagctgcgctcctggcggcggcccgagatcttcctggtgttcgtgttcgccgcggtcgtcacccccagccaggacccgttcaccatgctcgcgctgggcctgcccatggtgctcctctacgaggtcgcgctgatcatcggctggctgaacgaccggcgggtggcccgccgcggggacacctccccgtatgccgacctggacgacgacgagacctccccgctggacttcgacgacgccccgccccgcccggcggcctccgcgggccccgcggcgacggccacgtcgcccggcacggcgaacccgcccggcacggcgaacccgcccggcacggcgaacccggtcggcacggcgaacccggtcggcaccgggtcgtcaacacccgtcggcgcggggacggcccccgtctccccaagcaccgacgtcacccacggcgacatcacctga

SEQ ID NO: 6610 - protein, 364 aa, Frankia sp. CcI3
MPGLPTPRRLVASVNYRRTRTVEDSRMPLTEHLRELRNRVAIALLAFAIAGVVCFIFEPRIFDWLKAPYCDLPASKRFSPDGLAANDCTLYFFGILDAFTIRLKISMIAAVVVSSPVWLYQLWSFITPGLHRHERRWSLTFVGVSLVLFATGAVFAYLTLSTGLGLLLGFGGNGLVSVLDGNRYLSYVQAMLLIFGLSFEVPLLVMMLNLAGIVSTAKLRSWRRPEIFLVFVFAAVVTPSQDPFTMLALGLPMVLLYEVALIIGWLNDRRVARRGDTSPYADLDDDETSPLDFDDAPPRPAASAGPAATATSPGTANPPGTANPPGTANPVGTANPVGTGSSTPVGAGTAPVSPSTDVTHGDIT

SEQ ID NO: 6611 - DNA, 840 bp, Novosphingobium aromaticivorans DSM 12444
  CDS (1)..(840): transl_table=11
gtgatctctgacatcgatgaaacccaggcgccgctgctggaccacctgctcgaactgcgcacgcggttgctgcgctgcgtctatgcgctgatcgtggctttcgcggtgtgtttctactttgccgacgacatcttcgcgatccttgcccggccgctggtcgtggccttcccgccggggcagggcaagctgatctacaccaagctctacgaggcgttcttcgtcgagttgaaggtgtcgatgttcgcggcgttcttcatcagttttccggtaatcgccaaccagctctgggcctttgttgcgccggggctctatgcgcgggaaaagaaggcgtttttgccgttcctgttcgcaacgccgatcctgttcacgatgggcgccagccttgcgtatttcatcgtgatgccgaccgcgttcaagtggttcctcgggttcgaggggaacaagggcggccttcagctagaggcgctgccgggaacgggcgattatctcagtctcgtcatgcagttcatcctggccttcggcatcagcttcctgctgccggtcctgctcatgctgctgaaccgcgcggggatcgtcagccgcgagcaactggtcaaggcgcggcgctatgcgatcgtggtgatctttgccgtggcgaccgtggccaccccgccagacgtggtatcccagctcatgctggcgatcccgctgctgatcctgtttgaaggcacgctgctgatcatgcgcttcaccgagcgtgcggatgccaagcgacgggccgaggaagccgccgaggaagctgcggctgaagcacaggcgaggcttctgccagcaggcgaacagccacccctgcttccctga

SEQ ID NO: 6612 - protein, 279 aa, Novosphingobium aromaticivorans DSM 12444
MISDIDETQAPLLDHLLELRTRLLRCVYALIVAFAVCFYFADDIFAILARPLVVAFPPGQGKLIYTKLYEAFFVELKVSMFAAFFISFPVIANQLWAFVAPGLYAREKKAFLPFLFATPILFTMGASLAYFIVMPTAFKWFLGFEGNKGGLQLEALPGTGDYLSLVMQFILAFGISFLLPVLLMLLNRAGIVSREQLVKARRYAIVVIFAVATVATPPDVVSQLMLAIPLLILFEGTLLIMRFTERADAKRRAEEAAEEAAAEAQARLLPAGEQPPLLP

SEQ ID NO: 6613 - DNA, 735 bp, Methylobacillus flagellatus KT
  CDS (1)..(735): transl_table=11
ttgaataacgcttcagatactttcgtctcgcacttgattgagttgcgtgaccgcttgctacgcatcattatcggtatcgtgctgtgtacgctggtgttgttcccgttcgccaacgacatttaccagtttcttgccaaacctctgttgcatagcttgcccgttggcggtcaaatgattgcgactgatgtcacgacgccattctttgtgcccatgaaagtggtatttctcacggcattcatactttccctgccacacaccctgtatcaagtgtgggcatttgtcgcgccagggctttatacacacgagcggcgcctgatcgggccgcttgtatttgcgagtaccgtgttattcctgatggggatggcattcgcttattttctagtgttccccgttgtctttggctttattacccacactgcgcctgaaggggtggcggtgatgacggatattggcaagtacctagactttgccatgactcttttcattgcatttggattggcgtttgaggtgccggttgccgtggtcctgctggtgagtgctggtgtcgtcagtgttgcatccttgcgcgaagcgcgttcatacgtgattgtcggagcatttgtcatcggcgctatttttaccccgcctgatgtgatttctcaggtgatgctggctgtgcctttatgggtgctgtacgaggccggcatcctagtggccagcttgatccagaaaaaaggccaacggcaactggattaa

SEQ ID NO: 6614 - protein, 244 aa, Methylobacillus flagellatus KT
MNNASDTFVSHLIELRDRLLRIIIGIVLCTLVLFPFANDIYQFLAKPLLHSLPVGGQMIATDVTTPFFVPMKVVFLTAFILSLPHTLYQVWAFVAPGLYTHERRLIGPLVFASTVLFLMGMAFAYFLVFPVVFGFITHTAPEGVAVMTDIGKYLDFAMTLFIAFGLAFEVPVAVVLLVSAGVVSVASLREARSYVIVGAFVIGAIFTPPDVISQVMLAVPLWVLYEAGILVASLIQKKGQRQLD

SEQ ID NO: 6615 - DNA, 951 bp, Mycobacterium sp. MCS
  CDS (1)..(951): transl_table=11
gtgcaaacccccggattcctcaagcggctcaacccgcggcaacgccgcgcacgggtcaatcccgacggcaccatgtcgttggtcgaacaccttcacgaactgcgcaaccggctcctggtggccgccgcggcgatcgtgctgacgaccatcttcggtttcttctggtacagccacggcatcctcggcttccacagcctcggcgaatggctgcgcggcccgtactgcgcgctgcctgagtccgcgcgcgcctccatcaccgaggacgggcagtgccgcctgctggccaccgcgccgttcgaccagttcatgctgcgcctgaaggtggcgctgatggcgggcatcgtgctggcctgccccgtgtggctgcatcaggtgtgggcgttcatcacccccggcctgtaccgcaacgaacgccggttcgcgatggcgttcgtgaccatcggggcggtgctcttcatcagcggcgcgatcctggcctacgtggtgctcgccaccgccctgggattcctgctgaccgtcggcagcgacgtgcaggtcaccgcgctctcgggtgaccagtacttcgggttcttgatcaacctgctgctggtcttcggcttcagcttcgaattcccgctgctgatcgtgatgctcaacttcatcgggatgctgccctacgagcgcctcaaggcgtggcggcgcggcctgatcttcgcgctgttcgtgttcgccgccttcttcacacccggctctgacccgttctccatgctcgcgctggcgtgtgcgctgaccgtgctgctcgagttcgcgatccagatcgcacgcatccacgacaagcgcaaggcgaagcgggaagccgccgaaaccgtgccggaggacgaggccgcgccgatcggcggcgtcgaaccgatcgaaccgcccagcgcggtgtcgagcccctcccgatccaccattcatgacgaatccacctga

SEQ ID NO: 6616 - protein, 316 aa, Mycobacterium sp. MCS
MQTPGFLKRLNPRQRRARVNPDGTMSLVEHLHELRNRLLVAAAAIVLTTIFGFFWYSHGILGFHSLGEWLRGPYCALPESARASITEDGQCRLLATAPFDQFMLRLKVALMAGIVLACPVWLHQVWAFITPGLYRNERRFAMAFVTIGAVLFISGAILAYVVLATALGFLLTVGSDVQVTALSGDQYFGFLINLLLVFGFSFEFPLLIVMLNFIGMLPYERLKAWRRGLIFALFVFAAFFTPGSDPFSMLALACALTVLLEFAIQIARIHDKRKAKREAAETVPEDEAAPIGGVEPIEPPSAVSSPSRSTIHDEST

SEQ ID NO: 6617 - DNA, 867 bp, Mesorhizobium sp. BNC1
  CDS (1)..(867): transl_table=11
gtgagtgtcaaggacaacgaggacgaggtggaaaaatcctcggcgccgctgatcgaacacctcatcgagctgcgttcacggctggtttgggcagtcggcgcgttcttcgtcgcctttctcgtctgcttctttttcgcccgcgagatcttcaacctgctggtgatcccgttccaatgggccacccgttgggcgggcctcaactccgagcaggtggacctcatctacaccgcgccgcaggagttcttcttcacgcagatcaagctggcgatgttcggcgggctggtgctcgcttttccgatgatcgccactcagatctataaattcgtggcgccggggctataccgcaatgagcggaaagcgttcctgccctttctggtcgcctcgccgatcctgttcctgatcggcgccgcgctcgtctatttcttcttcacgcccatggtgatgtggttcttcctgtccatgcagcaggtggggccggacaatgaggtccagatttcgcttctgccgcgcgtctccgaatatctcggtctggtgatgacgctgatcctctcattcggcctggtgttccagttgcccgtggtcacgacgctcatggcgcgtgtgggactgctttcctcgcaggcgctcgccgacaagcgcaagatggcgatcgttatcgctttcgtggttgcagcggttctgaccccgcccgatccgatcagccagatcggtcttgcgcttccgaccatccttctctacgaggtctcaatctggagcgcccggatggtggagcgcaagcgcgaggaagaaaggctggcagccgaagccgcgcaggcggcggaggaaaacgccccagcggatgccggaacgagcgcaggctcggcctga

SEQ ID NO: 6618 - protein, 288 aa, Mesorhizobium sp. BNC1
MSVKDNEDEVEKSSAPLIEHLIELRSRLVWAVGAFFVAFLVCFFFAREIFNLLVIPFQWATRWAGLNSEQVDLIYTAPQEFFFTQIKLAMFGGLVLAFPMIATQIYKFVAPGLYRNERKAFLPFLVASPILFLIGAALVYFFFTPMVMWFFLSMQQVGPDNEVQISLLPRVSEYLGLVMTLILSFGLVFQLPVVTTLMARVGLLSSQALADKRKMAIVIAFVVAAVLTPPDPISQIGLALPTILLYEVSIWSARMVERKREEERLAAEAAQAAEENAPADAGTSAGSA

SEQ ID NO: 6619 - DNA, 1041 bp, Rhodococcus sp. RHA1
  CDS (1)..(1041): transl_table=11
gtgcgaattccgttcgatccgcgccacagcaagcggaggaccaatcccgacggcaccatgtcgttggtcgatcacctctacgagctgcgcacgcggttgctcctgtcggtgctggccatcgtggtcaccaccgcggtgggcttcttctggtactcccaccagattctcgggatcgagagtctcggtgagcttctccgcgggccgtactgttcgctgcccgcgtcgagtcgcgccgacctgagcaacgacgggtcgtgccgcctcctcgcgaccggaccgttcgagcagttcatgctccgattcaaggtcgcgctgaccgcgggcgtcgtcctggcctgccccatctggctgtaccagctgtgggcgttcatcacgcccggtctctacgcgaaggagcgccgttacgcgatcggcttcgtggtgtccggtgccgcgctgttcatcgcaggcgccgtcctcgcctacgtggtcgtcgcgaaggcgctgcatttcctgctgacgatcggcgacaacgttcagatcaccgcactcggcggcgcggaatatttcgggttcatcatcaacctgctgatcatcttcggtgtgagcttcgagataccgctgctcatcgtcgcgctgaacttcgtcggcattctgccgtacgcgaagctcaaggcgtggcgccgcggcctgatcttcgctctgttcgtgttcgccgcgatcgcgacccccgggcaggacccattctcgatgctcgcgctcgcgttcgcgttgaccctgctgttcgaggtcgccgtgcagatcgcccgcatcaacgaccgccgcaaggcccgtcgcacggaacaggagtggggtgccctcgacgacgacgaggcgtcgaccatcgccgcaccgtcggacctgaacgaggcgttcgacgtcgccgccacaccggtccccgagccggcgggccggttccggcggtcacgcaagtccggcaagcccgcgggtgccaacaagaacgacgacgcgagcacgaccggcagcaacacaccgggtcaggacttctccgacaccctgtga

SEQ ID NO: 6620 - protein, 346 aa, Rhodococcus sp. RHA1
MRIPFDPRHSKRRTNPDGTMSLVDHLYELRTRLLLSVLAIVVTTAVGFFWYSHQILGIESLGELLRGPYCSLPASSRADLSNDGSCRLLATGPFEQFMLRFKVALTAGVVLACPIWLYQLWAFITPGLYAKERRYAIGFVVSGAALFIAGAVLAYVVVAKALHFLLTIGDNVQITALGGAEYFGFIINLLIIFGVSFEIPLLIVALNFVGILPYAKLKAWRRGLIFALFVFAAIATPGQDPFSMLALAFALTLLFEVAVQIARINDRRKARRTEQEWGALDDDEASTIAAPSDLNEAFDVAATPVPEPAGRFRRSRKSGKPAGANKNDDASTTGSNTPGQDFSDTL

SEQ ID NO: 6621 - DNA, 738 bp, Haemophilus somnus 129PT
  CDS (1)..(738): transl_table=11
atgactgtcgaaaaatctcagcccttaattagccatttattagaactgcgtgatagattattacgttgtatcgtttttgtggtcgtaatatttctcgccctagtttattttgcaaatgatatttataactttgttgcctcgcctttattagatgtattgcctgccggtgcgacaatgattgcgacgaatattgcgacacctttctttactccgattaagttaaccgcagtagttgctttatttatttcagtgccttttctgttatatcaagtttgggcatttgttgctcctgccttgtatcaacatgaaaagcggttggtatatcctttgctgttttccagcacattgttgttttatctcggtgtagcctttgcttattatgtggtattcccattagtatttgcttttttaactaagacagctccggaaggcgttgctatcgctacggatattagtagttatttggattttgttttagccctattcttggcctttgggatatgttttgaagtgccggtagccattgttttattatgctggagcggtgtgactacgccggatgatttaagaaaaaaaagaccttacattattgttgccgcattttttattggcatgctactaacgcctcctgatgcgatttctcaaacattgttggctttgccgatgtgtttattatttgagataggtgttatttgtgcgggtttttatcagccaaaagatgaacaggaaaaatcataa

SEQ ID NO: 6622 - protein, 245 aa, Haemophilus somnus 129PT
MTVEKSQPLISHLLELRDRLLRCIVFVVVIFLALVYFANDIYNFVASPLLDVLPAGATMIATNIATPFFTPIKLTAVVALFISVPFLLYQVWAFVAPALYQHEKRLVYPLLFSSTLLFYLGVAFAYYVVFPLVFAFLTKTAPEGVAIATDISSYLDFVLALFLAFGICFEVPVAIVLLCWSGVTTPDDLRKKRPYIIVAAFFIGMLLTPPDAISQTLLALPMCLLFEIGVICAGFYQPKDEQEKS

SEQ ID NO: 6623 - DNA, 858 bp, Trichodesmium erythraeum IMS101
  CDS (1)..(858): transl_table=11
atgacacttccagaggacttaaataagaatagtttagcacctacacctacaggtctaaaaaatccagaaattagctctgataaagtggaggatattacttccccagacttagaagatccccggaattcggaagcagatgataatcttgacaaagttcctgatgaagttgaaatgtcgatatttgagcatctcgaagagttacgaatgcggatattctcttctttaataggagcaatagtaggtatcttatgttgtttcatttttgttaaacccattgtcaaatttctagaagttccagctcaaggagtgaaatttatccaactcgctccaggagaatacttttttgtcactattaaagttgctgcttatgggggtcttctcttagcaagtccctttatactttatcaaataattaaatttgttctccctggtttaacgactagagaaagaagatttctcggaccaattttcttaggttctacagtcttatttggactggggttagtatttgcttattttgcaattgtaccagcagctttaaagttttttattggttatggtttagaagcggtagagcaagcatggtcaattgaaaaatactttgaatttgtattactattaatgtttagtacggcattagcatttcaagttccaattctacaattattattaggtattgtgggaatagttaattctcaacaaatgttatccagttggaaatatgtattgttaggatctgtagttttaggagctgttttaactccttctactgaccctttgactcaaagtctattaggtggagctgtagttgctctttatcttgcaggtacttttgttgttaagttaattggcaaataa

SEQ ID NO: 6624 - protein, 285 aa, Trichodesmium erythraeum IMS101
MTLPEDLNKNSLAPTPTGLKNPEISSDKVEDITSPDLEDPRNSEADDNLDKVPDEVEMSIFEHLEELRMRIFSSLIGAIVGILCCFIFVKPIVKFLEVPAQGVKFIQLAPGEYFFVTIKVAAYGGLLLASPFILYQIIKFVLPGLTTRERRFLGPIFLGSTVLFGLGLVFAYFAIVPAALKFFIGYGLEAVEQAWSIEKYFEFVLLLMFSTALAFQVPILQLLLGIVGIVNSQQMLSSWKYVLLGSVVLGAVLTPSTDPLTQSLLGGAVVALYLAGTFVVKLIGK

SEQ ID NO: 6625 - DNA, 750 bp, Shewanella sp. MR-4
  CDS (1)..(750): transl_table=11
atgtcgcaacagcagccacttatcagccatttgcttgaacttaggtccaagctgcttaaatccattgccagtgtgttattagtgttcatttgtagcgtgtattgggcaaatgatatttaccattacatggcaatccctttaatgcagtctttgcccttaggtggcagcatgattgcgaccgatgtggccgcacctttcttcgcccctttcaaactaactttggtactgtcattttttgtggcggtaccctatgtgctctatcaaatttggtccttcgtcgcacccggtttgtataagcatgaaaaacgcttagtcatgccgctactctttagcagcacagtgctgttttacttaggaatagcctttgcgtattacattgtattccctgtggtatttggcttctttgccaacacagcccccgagggagtacaagttgcgaccgatatcagcagctatctcgattttgtgctgaagttattttttgcctttggcttatcctttgaaatcccggttgccgtagtcctgctttgctgggcgggtgtaaccactcctgaagatctcaaacaaaaacgcccttatatcattgtcggcgcattcgtggtcggtatgctgttaacgccaccggatgttatatcccagactatgcttgccgtaccaatgctgttattgttcgaaggcggattatttgcagctcgtttttacagtaaacctgatgacgagaccgacgaagaagaatcaacgaacgactaa

SEQ ID NO: 6626 - protein, 249 aa, Shewanella sp. MR-4
MSQQQPLISHLLELRSKLLKSIASVLLVFICSVYWANDIYHYMAIPLMQSLPLGGSMIATDVAAPFFAPFKLTLVLSFFVAVPYVLYQIWSFVAPGLYKHEKRLVMPLLFSSTVLFYLGIAFAYYIVFPVVFGFFANTAPEGVQVATDISSYLDFVLKLFFAFGLSFEIPVAVVLLCWAGVTTPEDLKQKRPYIIVGAFVVGMLLTPPDVISQTMLAVPMLLLFEGGLFAARFYSKPDDETDEEESTND

SEQ ID NO: 6627 - DNA, 789 bp, Alkalilimnicola ehrlichei MLHE-1
  CDS (1)..(789): transl_table=11
gtgagtgaccgttccccggaccgggatcgcgacgaccagcaacgggattccaaccaggaggccttggaggaccagccgctgctgagccacctgctggagttgcgcagccgactgttccgcgcggtggtggtgatcctggtcgcctttctggcgctctatccctttgccgacgagatctaccagtttgtctccggaccgctgcgggcggtgctgccggagggcacctcgatgatcgccatcaaggtggcctcgcccttcctgatcccgatgaagctggccctggtggcggccatcttcctcaccatcccctataccctctaccaggcctgggcctttgtggcccccggcctctaccggcatgagcgccgcctggtggggccgctggtggtggccagcaccttcctgttctacgggggtgcggcgtttgcctactttgtggtgtttccgctggccttttccttcttcgcggccacaacccccgaaggggtgtcgatgatgacggatatcagcgaatatctgtccttcgtgcttaccctcttttttgcctttggtgtggcgttccaggtgccggtggccaccatcctgatggtgcgcaccggggccaccacgcgggaggcgctggcagccaagcggccctatgttatcgtcggggccttcgtcctgggcatgctgttgaccccgccggacgtgatctcgcaagtgctgctggcggtccccgtctacctgctttacgagttggggatcctcctggcgcggcggactgcaacccccgaggagcgggtggactag

SEQ ID NO: 6628 - protein, 262 aa, Alkalilimnicola ehrlichei MLHE-1
MSDRSPDRDRDDQQRDSNQEALEDQPLLSHLLELRSRLFRAVVVILVAFLALYPFADEIYQFVSGPLRAVLPEGTSMIAIKVASPFLIPMKLALVAAIFLTIPYTLYQAWAFVAPGLYRHERRLVGPLVVASTFLFYGGAAFAYFVVFPLAFSFFAATTPEGVSMMTDISEYLSFVLTLFFAFGVAFQVPVATILMVRTGATTREALAAKRPYVIVGAFVLGMLLTPPDVISQVLLAVPVYLLYELGILLARRTATPEERVD

SEQ ID NO: 6629 - DNA, 828 bp, Hyphomonas neptunium ATCC 15444
  CDS (1)..(828): transl_table=11
atgaaccagttgccgccaaaagatgagcagccagaaattctggatgatgaggtggagtcgagccgcgcgccgttgctgacccatctgatcgagctgcgcgggcggctgatcaagattctgctggcgctgggcacggcgaccatctttgcgttcttcttcgccgatcagatttacaacctgctggtcgcgccctttgcctcgatggcggaagatgtacgtggctcgaagctggaattcatcttcaccgcgccgatggaatttttcttcgccaagctgaagcttgcgctgtttgcgggcgtcttcctcgcattccccgttattgcctggcaggtctatgccttcgtcgcgccggggctctataaaaacgagcggggcgcgttctggccctacctggtgttcgcgcctctgttgttctcactgggagcggcgttcgtctatttcataatgctgccgatgctggcgcgcttcaccatttcgatggagcaggtcgacgcggcgcagacgacgatcaagatgatgccgcgggtgagcgattacctggcgctggtgatgtcgctgatgctggcctttggcatttcgttccagctgccggtgatcctcacattgctggccaagatcgggatcgtgacgtccgaaggcctgggcaaggggcgcaaatatgccatcgttggcatcctggcttttgctgcggtgttcacgccgccggatgcaatttcacagcttcttctcgcggtgccggtctactgtctctacgagatttcgatcttttgcgtgcgcctgatcgagaagaaagccgagaaggaagaggccgctacggccgcagagtga

SEQ ID NO: 6630 - protein, 275 aa, Hyphomonas neptunium ATCC 15444
MNQLPPKDEQPEILDDEVESSRAPLLTHLIELRGRLIKILLALGTATIFAFFFADQIYNLLVAPFASMAEDVRGSKLEFIFTAPMEFFFAKLKLALFAGVFLAFPVIAWQVYAFVAPGLYKNERGAFWPYLVFAPLLFSLGAAFVYFIMLPMLARFTISMEQVDAAQTTIKMMPRVSDYLALVMSLMLAFGISFQLPVILTLLAKIGIVTSEGLGKGRKYAIVGILAFAAVFTPPDAISQLLLAVPVYCLYEISIFCVRLIEKKAEKEEAATAAE

SEQ ID NO: 6631 - DNA, 828 bp, Rhizobium leguminosarum bv. viciae 3841
  CDS (1)..(828): transl_table=11
atgagcggtgatatcgaagacaagccgcagccgttgatcgagcacctgatggagctgcgcacgcggctgatgtggtcgatcggcgcgtttttcgtcgccttcatcgcatgcttcttttttgccaagaatctcttcaattatctggtcatcccatacaagacagcggtccagtgggctaatctcgacgtcgagaaggcccagctcatctacaccgcgccgcaggaattcttcttcacccaggtcaaggtggcgatgttcggcggccttgtggtcgctttcccgatcatcgccgcccaagtctacaagttcgtggcgcccggcctctacaagaacgagcgtcaggctttcctgccgttcctggtcgcctcgccggttctgttcctgatgggcggcgcgctcgtctatttcttcttcacgccgatggtcatgtggttcttcctgtcgatgcagcaggcgccgggtcatgacgagatagcgatctcgctgatgccgaaggtctcggaatatctgagcctgatcatgacgctggtcttctccttcggcctagtcttccagctgcctgtcatcaccacgctgctcgcccgtgtcggtcttctgacgtcgcaatggctcgccgaaaagcgcaagtttgccatcgtcctcgccttcgtcgtcgccgccgtgctgacgccgccggacccgatgtcccagatcggccttgcgataccgacgatccttctctacgagatttccatctatgcggcgcgactcgtggagcgccagcgtgcccggcaggcggtcgaaaaggaaaccggatccgcagacgttgccaagacggacagcgtctaa

SEQ ID NO: 6632 - protein, 275 aa, Rhizobium leguminosarum bv. viciae 3841
MSGDIEDKPQPLIEHLMELRTRLMWSIGAFFVAFIACFFFAKNLFNYLVIPYKTAVQWANLDVEKAQLIYTAPQEFFFTQVKVAMFGGLVVAFPIIAAQVYKFVAPGLYKNERQAFLPFLVASPVLFLMGGALVYFFFTPMVMWFFLSMQQAPGHDEIAISLMPKVSEYLSLIMTLVFSFGLVFQLPVITTLLARVGLLTSQWLAEKRKFAIVLAFVVAAVLTPPDPMSQIGLAIPTILLYEISIYAARLVERQRARQAVEKETGSADVAKTDSV

SEQ ID NO: 6633 - DNA, 861 bp, Solibacter usitatus Ellin6076
  CDS (1)..(861): transl_table=11
atgccccctcttcccgaagatgaggagatgctccgcatgtctttcgtggagcacctcaccgaagtgcgcgcgcgaattatcaaagccctgctcggcctgaccgtcgccttcgcggtcagcctgaccttcaccgaccccttgtggcgcttcatctgccgcccggccgcgcatgccctgcaatccctcggttatccgccgcagctctacgtgttcgacccgatggatagtttccagatcatctgggtcaagctccccgtggtctgggcgattttcctgggctcaccgtgggtgctctatcaggtctgggccttcatcgcaccaggactctatcgccacgaacgccgctgggctgcgccgctcatcataggctcctccggccttttcattctcggcggcgtcttcgcttacttcgtgatcttcccctacggcctgaccttcctgctgagtatcgcgaaaagcgaattcgtgattccgcaggtgccgctggatatctactttcagacgttcgtgaatgtagtgctgagcgtcgccgtgattttcgagctgccggtgctggtctttctgctcaccgtgctcggcgttgtcacaccgcgatttctcttgcggcagagccgtttcgtggtactggcgatcttcattctcgccgcctttgtaacgccatccaccgacgtcttcaacctgctgctgttcgctacgccgatgtgcgttctcttctatctcggcgtcctgctcagctacctgttcacgctgcgccgcgaccaccgcgcatttccctggaagccggtcttgctcatcgccggcggcgccgccgccgcaggcggcgcgacgtgggccttcgtccgctcacgccgcgcccactaa

SEQ ID NO: 6634 - protein, 286 aa, Solibacter usitatus Ellin6076
MPPLPEDEEMLRMSFVEHLTEVRARIIKALLGLTVAFAVSLTFTDPLWRFICRPAAHALQSLGYPPQLYVFDPMDSFQIIWVKLPVVWAIFLGSPWVLYQVWAFIAPGLYRHERRWAAPLIIGSSGLFILGGVFAYFVIFPYGLTFLLSIAKSEFVIPQVPLDIYFQTFVNVVLSVAVIFELPVLVFLLTVLGVVTPRFLLRQSRFVVLAIFILAAFVTPSTDVFNLLLFATPMCVLFYLGVLLSYLFTLRRDHRAFPWKPVLLIAGGAAAAGGATWAFVRSRRAH

SEQ ID NO: 6635 - DNA, 816 bp, Magnetococcus sp. MC-1
  CDS (1)..(816): transl_table=11
atgaacctggacgttgaacaaaaagccccgctggttgaacatctcattgagctacgcaaccgattgatgatctcggtaggggcgattattgtcggctttatcttgtgctacagcttttctgagcaaatttttgagtttttggcggcccccctgcatgagattttgggcccccaggcaaagatgatctacacggccctgcatgaagccttttttacgcagatcaaggtctctttttttgcgggactgtttctcgctatgccggtgctgtttacccagatgtggctgtttattgcgccggggctttaccaacatgagcgttcggccatcctgccctttttgtttgtcacaccggttctcttttttatgggtggcaccctagcttactactttgtttttccattggcttttaaatttttcttggggtttcagtcgtctaccatcgaagcgctaccgtccatgcgggagtatctttcgctggtgattaagctcatcattgcctttggtattacctttgagctgccggtggggctgttgttggccattaaggccggggttgtctctacggcgggtttggtagacaaacgtaaatacaatattgtattggcctttgtggcggcggccattttaaccccgccagacccctttacccaggtaatgttggccatacccattatgttgatgtatgaaatttcaatcttttttggtcgcggcatcgagcgcaaacgcgccgagcaagaagccgccgaagaggcccaatgggccgctgaccataatgtcgatgatgatgatgtagaccacccggagcataaagcatga

SEQ ID NO: 6636 - protein, 271 aa, Magnetococcus sp. MC-1
MNLDVEQKAPLVEHLIELRNRLMISVGAIIVGFILCYSFSEQIFEFLAAPLHEILGPQAKMIYTALHEAFFTQIKVSFFAGLFLAMPVLFTQMWLFIAPGLYQHERSAILPFLFVTPVLFFMGGTLAYYFVFPLAFKFFLGFQSSTIEALPSMREYLSLVIKLIIAFGITFELPVGLLLAIKAGVVSTAGLVDKRKYNIVLAFVAAAILTPPDPFTQVMLAIPIMLMYEISIFFGRGIERKRAEQEAAEEAQWAADHNVDDDDVDHPEHKA

SEQ ID NO: 6637 - DNA, 741 bp, Phaeodactylum tricornutum
  CDS (1)..(741): transl_table=11
atgacgactaattctaattttaattttacgaataatacaacagtaacattggaattacctttttcagaacatattgaagaattaagacaacgaatttttcttgtattttggataattctattattaacgtctgtatcatttattgaagtcaaaagtttagttaaaattttagaaatgccaattacaaatgtaaaattctttcaagtagctcctggcgaatattttatttcaactattaaaatttcattttacacagggttacttttttcaagtccatttgtaataggtcaattgattctatttttactaccaggcttaacaaaaaaggaaacaaaaattgttttacctttgctattaagttcattagttttatttgcattaggattagctttttcatattacacgttaattccggctgctttaaactttttcttaaactacagtgaagaagttttagaaccattctggtcttttgatcaatattttgaattcattttagttttattttacagcactggcttagcatttcagataccgattattcaaattttagttgggttattaaatattataacagctaaacaaatgttgggtgcgtggcggtatataatactagtgtcgacaattcttggggcaattttaacgccctcgactgatccttttacacagttgttgttatctttagcaatactgttattatatttatcaggattaggtatcttgtttttaataaagaactaa

SEQ ID NO: 6638 - protein, 246 aa, Phaeodactylum tricornutum
MTTNSNFNFTNNTTVTLELPFSEHIEELRQRIFLVFWIILLLTSVSFIEVKSLVKILEMPITNVKFFQVAPGEYFISTIKISFYTGLLFSSPFVIGQLILFLLPGLTKKETKIVLPLLLSSLVLFALGLAFSYYTLIPAALNFFLNYSEEVLEPFWSFDQYFEFILVLFYSTGLAFQIPIIQILVGLLNIITAKQMLGAWRYIILVSTILGAILTPSTDPFTQLLLSLAILLLYLSGLGILFLIKN

SEQ ID NO: 6639 - DNA, 957 bp, Mycobacterium avium 104
  CDS (1)..(957): transl_table=11
gtgaaagcattcaaggtttcagcgcgcacatccggcctgctgaagcgtctcaatccgcgcaacagacgcagccgcaccaatccggacgcgaccatgtcgctggtcgaccacctgaccgagctgcgcacccggctgctgatctccctggccgcaatcgcgctgaccaccatcttcgggttcttctggtactcgcattcgatcttcgggctggaaagcctcggcgagtggctgcgccatccctactgcgcgcttccgcagtcggcgcgggcggagatcagcgccaacgggcaatgccggctgctggccacggcaccgtttgaccagttcatgctgcggctcaaggtgggcttgacggccggggtggtgctggcctgtccggtgtggttctaccagttgtgggcgttcatcacgcccgggctgtaccagaaggagcgccgcttcgcgatcgcgttcgtgatcccggccgtggcgctgttcgtggccggcgcggtgctggcctacttcgtgctgtccaaggcgctgggctttttgctgacggtcggcagcgacgtgcaggtgaccgctctgtcgggggaccggtatttcggcttcctgatcaacctgctgatcgttttcggggtgagtttcgaattcccgctgctgatcgtcatgctcaacaccatcggcgtgctgacctacccgcggctcaaggcgtggcggcgcggattgatctttgcgatgttcgtgttcgccgcgatcttcacgcccggctccgatcccttttcgatgacggcgctgggcgtggccttgtcggtgctgctcgagttcgccatccagatcgcccggctgcacgacaagcgcaaggccaaacgcgaagcccaggccgtgattcccgacgaccaagcctcggtcatcgaaccgcccacggccataccggagccgtcgctgtcggccggccagcatgacgatgtcacctga

SEQ ID NO: 6640 - protein, 318 aa, Mycobacterium avium 104
MKAFKVSARTSGLLKRLNPRNRRSRTNPDATMSLVDHLTELRTRLLISLAAIALTTIFGFFWYSHSIFGLESLGEWLRHPYCALPQSARAEISANGQCRLLATAPFDQFMLRLKVGLTAGVVLACPVWFYQLWAFITPGLYQKERRFAIAFVIPAVALFVAGAVLAYFVLSKALGFLLTVGSDVQVTALSGDRYFGFLINLLIVFGVSFEFPLLIVMLNTIGVLTYPRLKAWRRGLIFAMFVFAAIFTPGSDPFSMTALGVALSVLLEFAIQIARLHDKRKAKREAQAVIPDDQASVIEPPTAIPEPSLSAGQHDDVT

SEQ ID NO: 6641 - DNA, 789 bp, Acidovorax sp. JS42
  CDS (1)..(789): transl_table=11
atgtccgaaataccgaaccaagaagacgagctcgccggtaccgagcagcctttcgtgcagcacctgatggagctgcgcgaccgcctcgtgaaggccatgatcgcggtgggggtcgtcgcggccgccctgttcttctaccccggtcccggccagctgtacgacttcctggccgcgcccttggtggcccacttgccgcagggggctaccatgatcgccacctcggtgatctcgcccttcatggtgccgctcaagatcctgctgatgtcggcattcctcgtggcgctgcccttcgtgctgtggcaggtgtgggccttcgtggcgccggggctgtattcgcacgagaagcgcctggtgctgccgctggtggtttccagcacggtgctgttcttcatcggcgtggcgttctgctacttcttcgtgtttgggcaggtgttcagcttcatccagggttttgcacccaagagcatcacggccgcgccggacatcgaggcctacctgggcttcgtgatgaccatgttcctcgccttcggcctggcctttgaggtgccgatcgccgtggtggtgctggcgcgcctgaacgtcgtgagcgtggaaaagctcaagagcttccgcggctacttcatcgtggtcgcgttcgtgatcgccgccatcgtcacgccgccggacgtggtgtcgcaactggcgctggcgattcccatgtgcctgctctacgagttgggcatctgggcggcgcagctgttcatccgccataccaaggcacccgaagatccgcaggaatccgcgccgtga

SEQ ID NO: 6642 - protein, 262 aa, Acidovorax sp. JS42
MSEIPNQEDELAGTEQPFVQHLMELRDRLVKAMIAVGVVAAALFFYPGPGQLYDFLAAPLVAHLPQGATMIATSVISPFMVPLKILLMSAFLVALPFVLWQVWAFVAPGLYSHEKRLVLPLVVSSTVLFFIGVAFCYFFVFGQVFSFIQGFAPKSITAAPDIEAYLGFVMTMFLAFGLAFEVPIAVVVLARLNVVSVEKLKSFRGYFIVVAFVIAAIVTPPDVVSQLALAIPMCLLYELGIWAAQLFIRHTKAPEDPQESAP

SEQ ID NO: 6643 - DNA, 825 bp, Magnetospirillum magnetotacticum MS-1
  CDS (1)..(825): transl_table=11
ttgagcgattcccacgacgacaagaccatgccgctgctcgagcatctgatcgagctgcgccggcggctgatctggtcggcgatcagcttcgtcatcgccttcgggatttgctattacttctccaacgagatctacgaattcctgctggagccttattccaaggcggctctggccaagggcggaaaccgccgcctgatctacaccgcgcccaccgaggcgttctttaccttcatgaaggtctcggccttcgccgccgccgccatgtgctttcccgtctgggcggggcagttgtgggccttcgtggcgcctgggctttataagcacgaaaagcaggcctttttgcccttcctgttcgccacgccggttctgttcatcatgggcggggccatggtctatttcctggtgctgcccaacctctacacctatctcctgggcttcgagaatctgatcggcggccccagtacgctgcccatccagatggaggccaaggtcaacgaatccctgtcgctgatcatgaccctgatcttcgccttcgggctggccttccagatgccggtgctgctgaccctgctggcacgcgtcgggctggtcaccgcccaaggtctggccgataagcgccgcttcgccattgtcggcaatttcgtcttcgccgccgtggtgacgccccccgatgtggtcagccagttgtcgctggccattcccatggtcgggctttacgagatttccatcctctcggcccgctgggcggagaagaagcgcgaagccgccctggccgatgacggcgacgacgacacggcccatgacgagaccgatttcaacgcttaa

SEQ ID NO: 6644 - protein, 274 aa, Magnetospirillum magnetotacticum MS-1
MSDSHDDKTMPLLEHLIELRRRLIWSAISFVIAFGICYYFSNEIYEFLLEPYSKAALAKGGNRRLIYTAPTEAFFTFMKVSAFAAAAMCFPVWAGQLWAFVAPGLYKHEKQAFLPFLFATPVLFIMGGAMVYFLVLPNLYTYLLGFENLIGGPSTLPIQMEAKVNESLSLIMTLIFAFGLAFQMPVLLTLLARVGLVTAQGLADKRRFAIVGNFVFAAVVTPPDVVSQLSLAIPMVGLYEISILSARWAEKKREAALADDGDDDTAHDETDFNA

SEQ ID NO: 6645 - DNA, 795 bp, Nostoc punctiforme PCC 73102
  CDS (1)..(795): transl_table=11
atgccgcctttacaagacgtagatactgtaaacgttcccaacatcgacccagaaggatatggcaactcggatacagatcctcttaatgagttgccagatgaagtcgaaatgtcccttttcgaccatctagaagagttacgacaacgaattttttattcgctgattgccgtagcgataggtattattggctgtttctttgccgttaagccgattgtccagctgcttgaggttccagcacaaggagtcaaatttctccaacttgcacctggtgaatatttctttgtctccctcaaagtcgcagcctacactggtttagtgctttctagtcctttcattctttaccaaattatccagtttgtgcttccaggactgactcgccgcgaacgccgtttattggggcctgtggtttttggttcgagtgtactgtttggcgcggggttagtatttgcctatttactccttatccccgcagcgttgaaatttttcatcagctacggagcagatgtagttgaacaactttggtcaatagataaatattttgaatttgtgctgctacttttattcagcactggtttagcatttcaaattcccatcatccaattgttgctcggtaatttgaatattgtctcgtctgaacggatggtttctggttggcgttacgtgattatgggagcagtggttttaggagctgtacttacaccttctaccgatcctctaactcaaagtcttttggcgggagccgttttagggctttatttcggtggtgttgggctggtgaagctcacaggtaaataa

SEQ ID NO: 6646 - protein, 264 aa, Nostoc punctiforme PCC 73102
MPPLQDVDTVNVPNIDPEGYGNSDTDPLNELPDEVEMSLFDHLEELRQRIFYSLIAVAIGIIGCFFAVKPIVQLLEVPAQGVKFLQLAPGEYFFVSLKVAAYTGLVLSSPFILYQIIQFVLPGLTRRERRLLGPVVFGSSVLFGAGLVFAYLLLIPAALKFFISYGADVVEQLWSIDKYFEFVLLLLFSTGLAFQIPIIQLLLGNLNIVSSERMVSGWRYVIMGAVVLGAVLTPSTDPLTQSLLAGAVLGLYFGGVGLVKLTGK

SEQ ID NO: 6647 - DNA, 756 bp, Rickettsia rickettsii
  CDS (1)..(756): transl_table=11
atgaaactatatagttttcaagaacatttattagaattaaaaataaggcttcttagaatatttactgcgtttataattatatttgctatttgctattattttagcgacaatatttatagtgttttattaaaaccgcttgctaagctaagcggtgatacggtacgaaatataatttatacagggcttacagaagcattttttacctatattaaacttgcagcttttactacttttactattattatacctataattgctttagagtgttatttatttatcagtcccgggttacaccgccatgaaaaaaaaattatcgcttttattctttttatgtcgcctattttattttggtgcggtagtatttttgttttttactttgtaatgccgaaagcttggaatttttttcttagttttgaaaaacgtgatatgatcctaccgatagttttggaagcaagaattagcgagtatctaaatttagttattcatttaattattgcttttggagtcgcctttcaactgccggttgtgataatgatattaaatatactaaaaatagttaaggtacaaacacttaagcaaaaaagatgcattgccgtggtaattaactttattattgcaggaatattaacgcctcctgacattttaagccagtttgctcttgcaataccgctacttttattatatgaaacttcaataattatatgtaattttatagaaaaactgaggacactaaatgttaaatatcaaatggattag

SEQ ID NO: 6648 - protein, 251 aa, Rickettsia rickettsii
MKLYSFQEHLLELKIRLLRIFTAFIIIFAICYYFSDNIYSVLLKPLAKLSGDTVRNIIYTGLTEAFFTYIKLAAFTTFTIIIPIIALECYLFISPGLHRHEKKIIAFILFMSPILFWCGSIFVFYFVMPKAWNFFLSFEKRDMILPIVLEARISEYLNLVIHLIIAFGVAFQLPVVIMILNILKIVKVQTLKQKRCIAVVINFIIAGILTPPDILSQFALAIPLLLLYETSIIICNFIEKLRTLNVKYQMD

SEQ ID NO: 6649 - DNA, 765 bp, Crocosphaera watsonii WH 8501
  CDS (1)..(765): transl_table=11
atgacccaaaccaatagtcaaccccgtaccgatgttgaaaaggaagcctatctcaacgaaatacccaatgaggtagaaatgtctttgtttgaccatctcgaagaactgcggatgcgtattttttactctttaattgcagtggcggtgggtatggttggttgtttcctggtggttaaacccttggtccgatggttagaagttccggctcaaggagtcaagtttttacagttagcccctggtgagttcttttttgtctcgattaaagtggctggttatagcggtttattggtggcgagtccttttattctttatcagattattcagtttgttttaccagggttaacccgtggggaacgtcttctattgggccctgtgattttaggatcgagtgtcttattttttgcgggaattggtttttcttattgggctttaattccggctgcgttaaacttttttatcacctacgggggcgatgttgttgaacaatcttggtccattgatcgctattttgagtttgttctattattaatgtttagtacgggtattgctttccaaattcctgtgattcaattaattttaggacagttgggtattgtctcttcaaatcagatgttaaagggatggcgtgtgattgttttaggctcggttattttgggtgcaattttaactccttctaccgatcccttaactcaatctttattagcaggggctgttttaggattatattttggtggtatcggccttgttaaattaactggaaaatag

SEQ ID NO: 6650 - protein, 254 aa, Crocosphaera watsonii WH 8501
MTQTNSQPRTDVEKEAYLNEIPNEVEMSLFDHLEELRMRIFYSLIAVAVGMVGCFLVVKPLVRWLEVPAQGVKFLQLAPGEFFFVSIKVAGYSGLLVASPFILYQIIQFVLPGLTRGERLLLGPVILGSSVLFFAGIGFSYWALIPAALNFFITYGGDVVEQSWSIDRYFEFVLLLMFSTGIAFQIPVIQLILGQLGIVSSNQMLKGWRVIVLGSVILGAILTPSTDPLTQSLLAGAVLGLYFGGIGLVKLTGK

SEQ ID NO: 6651 - DNA, 780 bp, Exiguobacterium sibiricum 255-15
  CDS (1)..(780): transl_table=11
atggcgatcgatcaagaacagagtgtgacatcgcacttagatgaactgcgtaagcggatcgtctggtcgctcatcattgtagtggtcatgtttatcgcagcctttccgctcgtccggccgctcgtccgtttcttacaggccgacttaaaggaactcggaattgggctgaatgcgtttaacgttgttgatccactgatgttatatctgaatcttgcgttcatcatcgcaatcgtcttggcatccccgttttggatgtatcagctttgggcattcatccgtcccggtctgcacgaccaagaacaaaaagcgacgttgacgtatattcccgtgacgtttttcttattccttgcgggtgtttcattttcttatttttggctgttgccgtttttactcgaagtatcgacagaactcggacaagagctcggaatcgaacaggtcatcggagtcgagaattatttcagctttctgatccggttgacgattccgttcggtctgttgttccagttaccggtcgtgacgatgtttttgacacggctcggactcgtgacgccgttcttcatgcggaagaatcggaagtatgcgtattttgcgttgttcgtgattgcggcgttgatctcaccgcccgacattacgtcgcatttgatgatttctgttccgttgttcgttttatatgaaatcagtatcctgatttcagcacggacctataaaaaagtcctgattctcgagcaggaagctgaactcgaacgacaggcggatatgatgcgtgagctgaacaaataa

SEQ ID NO: 6652 - protein, 259 aa, Exiguobacterium sibiricum 255-15
MAIDQEQSVTSHLDELRKRIVWSLIIVVVMFIAAFPLVRPLVRFLQADLKELGIGLNAFNVVDPLMLYLNLAFIIAIVLASPFWMYQLWAFIRPGLHDQEQKATLTYIPVTFFLFLAGVSFSYFWLLPFLLEVSTELGQELGIEQVIGVENYFSFLIRLTIPFGLLFQLPVVTMFLTRLGLVTPFFMRKNRKYAYFALFVIAALISPPDITSHLMISVPLFVLYEISILISARTYKKVLILEQEAELERQADMMRELNK

SEQ ID NO: 6653 - DNA, 807 bp, Kineococcus radiotolerans SRS30216
  CDS (1)..(807): transl_table=11
atgcccctcatggcccacctgaaggagctgcgcgaccgcgtcttcaaggcggccgtcttcctgctcatcggcagcgtggcgggctggttcctctggcggggctggaactacagctggggcgccttcgacggcgtcttccagtacctgcagcggcctctgctggactacgccgcctcggcggggtacgaggacgtcaagctcaacttcacccaggtcggccaggcgttcgacctggcggtgaagggggccatctggtgcggggtgatcgcctccagcccgttctggatctaccagctctgggccttcatcaccccgggcctgacgcggaaggagcggcgctacgcggtcgggttcatcttcgccgccgtcccgctcttcctcgccggcgcggccatcgcctacgcggtgctgcccaacgcgatgcggttcctcgtcgacttcacccccgtcgacgcggcgaacctcatcggggccgacatctacctgtcgttcgtcatgcggatcatcctggccttcggcctgggcttcctcatgccggtcgtgctggtcgggctgaacttcgcccacctgctgtcgggccgggcggtcctgcggcagtggcgcatcagcgtcttcctgagcttcctgttctccgccctcgtgacgccgacgtccgacatcaccacgatgctgctgctggcctgcccgctgctggtcctcttcgcgctggccacggtcatctgcatcctcaacgaccggcgccgctcgaagaactccgacgagccggactacaccgacctcagcgacgacgaagccagcgcgatctga

SEQ ID NO: 6654 - protein, 268 aa, Kineococcus radiotolerans SRS30216
MPLMAHLKELRDRVFKAAVFLLIGSVAGWFLWRGWNYSWGAFDGVFQYLQRPLLDYAASAGYEDVKLNFTQVGQAFDLAVKGAIWCGVIASSPFWIYQLWAFITPGLTRKERRYAVGFIFAAVPLFLAGAAIAYAVLPNAMRFLVDFTPVDAANLIGADIYLSFVMRIILAFGLGFLMPVVLVGLNFAHLLSGRAVLRQWRISVFLSFLFSALVTPTSDITTMLLLACPLLVLFALATVICILNDRRRSKNSDEPDYTDLSDDEASAI

SEQ ID NO: 6655 - DNA, 741 bp, Xylella fastidiosa Dixon
  CDS (1)..(741): transl_table=11
gtgacctcatcggacgatttagagagcgaaagtagcctgattgagcacttgatagaactacgtgcacgcctgatacggatgttgatcggtcttggcttggtggtcagcgcgctgctgccattctcaaaagtcctttaccgttggttggcgacaccgatcatctcgcaattacccactggacagaacgtgatctccacccaacctaccggagcggtgtttgcaccactgaaattgactttctttctgggcctattcatcgccatgccctgggtgttgtaccaggtatgggcgtttatcgcaccaggtttgtatcagcgcgaaaaacgactcgcactccctttgctgatctcagccgtcgtgttgttttatatcggttgcgcattcgcctacttcctggtgttgcccgcagtcttccatttcctgaccacgttcaaaccagacgtcatccagctgaccccagacgctggcgcttacctggacttcgtactagccatcttcttcgccttcggtgccagctttgaacttccagtggccatggtgattttgaccgtactgcactgggtcaaaccaacccaactgcgtgaaagccgcagttatgcgatcgttgccatcttcatctttgcagcagtactgacaccaccggatgttgtctcgcaactcatgctcgcaataccgatgtgcctcctctacgagcttggcattgttgccgcctgggcggtcacccgcccaaaaacggtttga

SEQ ID NO: 6656 - protein, 246 aa, Xylella fastidiosa Dixon
MTSSDDLESESSLIEHLIELRARLIRMLIGLGLVVSALLPFSKVLYRWLATPIISQLPTGQNVISTQPTGAVFAPLKLTFFLGLFIAMPWVLYQVWAFIAPGLYQREKRLALPLLISAVVLFYIGCAFAYFLVLPAVFHFLTTFKPDVIQLTPDAGAYLDFVLAIFFAFGASFELPVAMVILTVLHWVKPTQLRESRSYAIVAIFIFAAVLTPPDVVSQLMLAIPMCLLYELGIVAAWAVTRPKTV

SEQ ID NO: 6657 - DNA, 936 bp, Roseovarius nubinhibens ISM
  CDS (1)..(936): transl_table=11
atgagcgacagcaatattcccggcgatgagctcgaagacagcgccgcgccgctgatcgaacatctggcagagctgcgcatgcggctgatccgctgtgtggtggcgtttctcatcggcatggtgatctgtttcaccgtggcgacgcctatctttacctttctgacctcgccgctctgtcaggtgctggccgagcgggggcaggattgcgacctgatcttcatcagcccgcaagaagggttcttcgtggcgatcaaagtgtcgctcttgggcgggttcatcctgtcctttccctatctcgccaatcagatgtggcggtttgtggcgccggggctctacaaatccgagaagggcgccttcctgccgtttctcgtggcctcgcccttcatgttctttctcggcgcgagttttgcgttctacgtggtgacgccgctcgcctatgatttcttcctgggctttcagcagtttggcaccggtggcgaggcgctgcccgatggcgatccgcaaaatgccgcgccgctgagcgtggtgttccagggctcggcgcaggaatatctcaacctcacgatcaagttcatcgtggcctttggcctctgctttcagctgccggtgctgctcaccctgatgggcaaggcggggctggtgacggcgccggggctcaaggcggtgcgcaaatatgcggtggtgggcattctggtgctggccgcgctggtgacgccgcccgatgtgatcacccagatcatcctcttcaccgtcgtctatggcctttacgaagtgtcgatcttcctcgtggcccgtgtggagcgtgagcgtgaaaagcgtctgcgcgccgaagggctctggttcgacgatgaggacgaggacgcggacgcggatgacgtcgcggagggcatggatgcccatcccgaagagatgctggacgacgagaccaaaaaatga

SEQ ID NO: 6658 - protein, 311 aa, Roseovarius nubinhibens ISM
MSDSNIPGDELEDSAAPLIEHLAELRMRLIRCVVAFLIGMVICFTVATPIFTFLTSPLCQVLAERGQDCDLIFISPQEGFFVAIKVSLLGGFILSFPYLANQMWRFVAPGLYKSEKGAFLPFLVASPFMFFLGASFAFYVVTPLAYDFFLGFQQFGTGGEALPDGDPQNAAPLSVVFQGSAQEYLNLTIKFIVAFGLCFQLPVLLTLMGKAGLVTAPGLKAVRKYAVVGILVLAALVTPPDVITQIILFTVVYGLYEVSIFLVARVEREREKRLRAEGLWFDDEDEDADADDVAEGMDAHPEEMLDDETKK

SEQ ID NO: 6659 - DNA, 915 bp, Oceanicola batsensis HTCC2597
  CDS (1)..(915): transl_table=11
atgaccaccgccgaagacgagatcgacgacagctccgccccgctgatcgaacacctggcggaactgcgcacgcgcctgatccggtcggtgctggccttcatcgccggcatggtgatctgcttcaccgtctggaacccggtgttcaatttcctgacccagccgctctgcgacgccatggcggcccgcggcgaaagcggcgactgcggcctgatcctgatcaagctgcaggagggctttttcgtcgccatctcgatctcgcttctgggcgggctgatcctcgccttcccctacatctccttccagatgtggcgcttcgtggccccgggcctctaccgcacggagaagaacgccttcctgccgttcctgctggcctcgccgggaatgttcttcctcggcgcggccttcgccttctacgtcgtcacgccgctggccttcgacttcttcctgggcttccagcagcccggctcggtcctgggcgaggaaacggccgagaacggcgtcgccggcatcgccttccagggctccgcgcaggaatacctctcgctgacgatcaagttcatcgtcgccttcggcctctgcttccagcttccggtcctgctgacgctcatgggcaaggcggggctggtctcttccgaggggctgggcaatgtccgcaaatatgccgtcgtagcgatcctggtcctggccgccctggtcacgccgccggatgtgatcacccagatcatcctcttcgtcgtggtctacgggctctacgagatttcgatctggctggtccgccgggtcgagacccggcgcgaggaacgcctgcgcgccgaaggctactatgacgacgaggaagagatgtccgatatcgtcgcggccgaagacccgctgcacgaggacgagaccggatcctccggacgcgggaatgactga

SEQ ID NO: 6660 - protein, 304 aa, Oceanicola batsensis HTCC2597
MTTAEDEIDDSSAPLIEHLAELRTRLIRSVLAFIAGMVICFTVWNPVFNFLTQPLCDAMAARGESGDCGLILIKLQEGFFVAISISLLGGLILAFPYISFQMWRFVAPGLYRTEKNAFLPFLLASPGMFFLGAAFAFYVVTPLAFDFFLGFQQPGSVLGEETAENGVAGIAFQGSAQEYLSLTIKFIVAFGLCFQLPVLLTLMGKAGLVSSEGLGNVRKYAVVAILVLAALVTPPDVITQIILFVVVYGLYEISIWLVRRVETRREERLRAEGYYDDEEEMSDIVAAEDPLHEDETGSSGRGND

SEQ ID NO: 6661 - DNA, 849 bp, Erythrobacter sp. NAP1
  CDS (1)..(849): transl_table=11
atggcattcgaaatcaaggatatcgacgaaacacgcgcaccgctgctcgatcacctgatcgagcttcgcacgcggctcgtccgctcggttttcgcgcttctcgtcggtttcggtatctgtttttatttcgccgatccgatcctcggatttctggtgcagccattgaaagaggcgttccctgatggcgagggacagctgatcttcacgcgattgccggagattttcttcgttgagctcaaggtcgggctgtttgcaggctttatggtcagcttcccgatcattgcgaaccagctttgggcctttatcgcccctggtctttacgcaaatgagaagaaggctttcctgccctttctcattgcaacgcctgtgttgtttatcggtggagcggcgctcgcctactatgtggtgatgcccactgccttccggttttttcttggatttggaggcgaggcgggcggtctgtcggtccaggcgctgcccacagcaggcgattatcttagtctcgtcatgcagttcatcctcgccttcgggatcaccttcctgctgccagtgctgctgatgctgcttcaccgcgccggcattgtaacgcggtctcagctcgctggtgctcgccgttatgtgatcgtgggcgtggtcgcgcttgccgcgattgttactccgcctgatccaggtagccaggtgattcttgcggtgcctttgcttttgctgttcgagggttcgcttttgctcatgcgtgtgcaggagagggcgatgaagcgggctggcggcaagtccgatgctggcgaagcagcgaaggaaaaacccgatgaagttgcaagcggcgatgatccgagcgtcaccgctgactag

SEQ ID NO: 6662 - protein, 282 aa, Erythrobacter sp. NAP1
MAFEIKDIDETRAPLLDHLIELRTRLVRSVFALLVGFGICFYFADPILGFLVQPLKEAFPDGEGQLIFTRLPEIFFVELKVGLFAGFMVSFPIIANQLWAFIAPGLYANEKKAFLPFLIATPVLFIGGAALAYYVVMPTAFRFFLGFGGEAGGLSVQALPTAGDYLSLVMQFILAFGITFLLPVLLMLLHRAGIVTRSQLAGARRYVIVGVVALAAIVTPPDPGSQVILAVPLLLLFEGSLLLMRVQERAMKRAGGKSDAGEAAKEKPDEVASGDDPSVTAD

SEQ ID NO: 6663 - DNA, 816 bp, Synechococcus sp. WH 5701
  CDS (1)..(816): transl_table=11
atgagcgaaccaaccccatccacagccagcagcggagccaccgaaaccgccctgcccgcgccagcacccatccgcgtcagctgcccggatgagttccccggcgaagtggagatgagcctgctggagcacctggaggagctgcggcgtcgcgtgctgcgcagcctgctggccctcgtggtttcggcggccgtctgcctggtgctggtgcgccccctggtgcgcctgctgcaggtgccggcggtgggaatgcgtttcctgcaactggccccgggggaatttctgttcgtctccctcaaggtggccggttacgccgggctcacccttgtgctcccctacgtcctctatgaagtgctctccttcgtgcttcccggcctgaccaggcgcgagcgccggctggtggcccccgcggtagcggcctcggcggtgctgttcatggccggattggccttcgcctggtgggcgctggtgcccgcggccctgcgcttcctggtgaactacggcgccgatgtggtggagccgatctggtcaatcgagcgctacctcgacttcgtgctgttgttgatggtggccactgggctggcctttgagctaccggtgctgcagctgctgctcggtgctttcggtctggtgggatcccgcaccatgctgggggcctggcgctgggtggtgctgggctcggccctggccggcgccgtgctcaccccctccaccgacccggtcacgatgctgctgctcaccggagcgatcacggccctgttcctgatcggggtggcgctggtggccctggtggagcaggtgcgccccgagcccgcttga

SEQ ID NO: 6664 - protein, 271 aa, Synechococcus sp. WH 5701
MSEPTPSTASSGATETALPAPAPIRVSCPDEFPGEVEMSLLEHLEELRRRVLRSLLALVVSAAVCLVLVRPLVRLLQVPAVGMRFLQLAPGEFLFVSLKVAGYAGLTLVLPYVLYEVLSFVLPGLTRRERRLVAPAVAASAVLFMAGLAFAWWALVPAALRFLVNYGADVVEPIWSIERYLDFVLLLMVATGLAFELPVLQLLLGAFGLVGSRTMLGAWRWVVLGSALAGAVLTPSTDPVTMLLLTGAITALFLIGVALVALVEQVRPEPA

SEQ ID NO: 6665 - DNA, 753 bp, Pseudoalteromonas tunicata D2
  CDS (1)..(753): transl_table=11
atgactagccagcaggcacactccggctttatcagccatttagttgaactaagaaaccgcttaatgcgcgccatcttcgcaattttaattattttcctcagcttagtgtatttcgccaacgatatttatagctttgtcgctacgccattaattgaacatttacccgcaaatgccagcatgatcgcgaccgatgtcaccgcgccattttttgctccatttaaactaaccttgtttgcagcattgtttttggcttttccttttgttttgcatcaggtttggggatttattgcacctggcctgtatcaaaatgaaaagcgtatgcttattccagtactgatttcgagcgtattgctgttttatagcggtattgcatttagctactttgtggttttccctataattttgggcttttttactagcataggtccagaggtgatgactctcacccccgatatcagtagctatcttgattttgtactaaagttatttttcgcatttggtatcgcttttgaaatcccggtgtttattatgctgttatgctggagcggcatgaccaccacaaccgatttaaaaaacaaacggccttacattattgtaggtgcttttgtattggcgatgtttctaacaccgccggacgtgctatcgcaaacactgctcgccatccccatgctagccctgtttgaactcggcttagttttggcttcattttattcaaaaaaacaatcaacagaagaaatggaacaacaagaatga

SEQ ID NO: 6666 - protein, 250 aa, Pseudoalteromonas tunicata D2
MTSQQAHSGFISHLVELRNRLMRAIFAILIIFLSLVYFANDIYSFVATPLIEHLPANASMIATDVTAPFFAPFKLTLFAALFLAFPFVLHQVWGFIAPGLYQNEKRMLIPVLISSVLLFYSGIAFSYFVVFPIILGFFTSIGPEVMTLTPDISSYLDFVLKLFFAFGIAFEIPVFIMLLCWSGMTTTTDLKNKRPYIIVGAFVLAMFLTPPDVLSQTLLAIPMLALFELGLVLASFYSKKQSTEEMEQQE

SEQ ID NO: 6667 - DNA, 762 bp, Photobacterium sp. SKA34
  CDS (1)..(762): transl_table=11
atgtcaaaagtcgaagatacgcagccgctatttagtcatttacttgaactacgtacgcgacttttgcgttctatcataagtgtactggtggtttttctatgtttagtatggttttccaatgatatctatgccttcttagctgcaccattagtagagcgaatgcctgctggtgcaacgatgatcgcaacagatgtcgcctcaccgttctttacaccgataaaactgaccttagtaacctcagtgtttattgctgtaccaatgattttgtatcaagtatggggctttattgcacctggtctatacaagcatgaacgcaagctgattatgccgttgttgttttccagctcattgctgttttacaccggtgttgcatttgcttattacgtcgtgtttccgttggtctttaagttcttcaccagtgtcgcccctcaaggggtggaggtggcaacagatattgcgaactatctcgatttcgtcctatcgctatttatggcgtttggtatcgcttttgaaattcctgttgctattattctgttgtgttggactggtgcgactgatccagaatcgctacgtagtaaacgtccttacattatcgtaggtgcgtttgtcgttggtatgatgttaacaccgcctgatattgtttctcagaccttgttggctgtgcctatgtgtttattgtttgaagttggcttattcttctcacgtttttatgtacgtgataatgaagagctggatgatcgcgagcacgaagagcagcaataa

SEQ ID NO: 6668 - protein, 253 aa, Photobacterium sp. SKA34
MSKVEDTQPLFSHLLELRTRLLRSIISVLVVFLCLVWFSNDIYAFLAAPLVERMPAGATMIATDVASPFFTPIKLTLVTSVFIAVPMILYQVWGFIAPGLYKHERKLIMPLLFSSSLLFYTGVAFAYYVVFPLVFKFFTSVAPQGVEVATDIANYLDFVLSLFMAFGIAFEIPVAIILLCWTGATDPESLRSKRPYIIVGAFVVGMMLTPPDIVSQTLLAVPMCLLFEVGLFFSRFYVRDNEELDDREHEEQQ

SEQ ID NO: 6669 - DNA, 819 bp, Oceanospirillum sp. MED92
  CDS (1)..(819): transl_table=11
atgagtgataagaatcagggaacccctgaacaagatcaggaacagccactcatcagtcatctggtggaactacgccagagacttatgtatgttctatttgcggtcttagttatctttctgggtctgttctattttgcgaacgatctatatacctacttatctgcaccgctgactgctctgctgccggaaggcaccagtatgatagcaacggatgtcacatcacccttctttgcaccatttaagctaacactggttgctgcgatttttctggcaatgccatttgtgcttcatcagatctggggatttatcgcaccgggtttatataagcatgaaaagcgcctggccgttccgttgttagtctcaagcatctttctcttctatgccggtatagcctttgcttattttgtggtgtttccactgatcttcggcttctttaccagcgtaggtcccgagaatgtagcggtgatgacggatatcagtagttatctaaactttgttctgaagctgttcttcgcgtttggtgttgtgtttgaaattccaatcgcaactttgttactcatctggacaggtgctgcaaccccagaggggcttcgacagaaaagggcctatgtaatcgtcggttgctttgtcttaggtatgttgctgacacccccggatgttatttcgcaaagcttattagcagttccaatgtggttactgtttgaagcaggcattcttttgggtgtgatctttgtccgaaaggagaaagaggaagaagacgaagaattagaggatgaatttgcagaagcaatgcaagaagaggaagagaacagtaaataa

SEQ ID NO: 6670 - protein, 272 aa, Oceanospirillum sp. MED92
MSDKNQGTPEQDQEQPLISHLVELRQRLMYVLFAVLVIFLGLFYFANDLYTYLSAPLTALLPEGTSMIATDVTSPFFAPFKLTLVAAIFLAMPFVLHQIWGFIAPGLYKHEKRLAVPLLVSSIFLFYAGIAFAYFVVFPLIFGFFTSVGPENVAVMTDISSYLNFVLKLFFAFGVVFEIPIATLLLIWTGAATPEGLRQKRAYVIVGCFVLGMLLTPPDVISQSLLAVPMWLLFEAGILLGVIFVRKEKEEEDEELEDEFAEAMQEEEENSK

SEQ ID NO: 6671 - DNA, 753 bp, marine gamma proteobacterium HTCC2143
  CDS (1)..(753): transl_table=11
atgactgacactgaaaaaaatcaagaccaggcgcagccattggtaagccaccttactgagctacgagatagattgctgcgctgcgtattggcaattttagtggtcttctttagtctcttttatttcgctaatgacatatattattttgtttcagagcctctgcgagtattgttgccagagggaactagtatgattgctacagaagtagcgtccccatttttaacgcccttcaagctaactttagtcgcttcgttgatccttgcaatgcctattattctttaccaagtctggggtttcattgctccgggtatgtaccgttcagaaaaacgtattgccattccattactggcttctagcatcgtcttattctacgcaggtctggccttcgcgtattacgtagtctttccgctgatttttggctttttcagcggcgtaggaccagaaggtgtcgcctacactcctgatattgcccgcttccttgatatcgtattgaaattattttttgcgtttggcgtcgccttcgaaattcctatcgcaactatattgttgatttgggctggtatcacaacacctgaaaccctctctgaaaaacgcccttatattgttgttgggtgttttgtgtttggcatgctgctgacaccacccgatataatttcgcaagcactgctagcattaccgatgtggctactttttgaatttggcgtcttctttggtcgttttattcaccctcgagaggacgaaaagaccacgtaa

SEQ ID NO: 6672 - protein, 250 aa, marine gamma proteobacterium HTCC2143
MTDTEKNQDQAQPLVSHLTELRDRLLRCVLAILVVFFSLFYFANDIYYFVSEPLRVLLPEGTSMIATEVASPFLTPFKLTLVASLILAMPIILYQVWGFIAPGMYRSEKRIAIPLLASSIVLFYAGLAFAYYVVFPLIFGFFSGVGPEGVAYTPDIARFLDIVLKLFFAFGVAFEIPIATILLIWAGITTPETLSEKRPYIVVGCFVFGMLLTPPDIISQALLALPMWLLFEFGVFFGRFIHPREDEKTT

SEQ ID NO: 6673 - DNA, 789 bp, Pseudomonas putida GB-1
  CDS (1)..(789): transl_table=11
atgagcgagaatccggaacacgaccagcctatgccgctggtttcgcacctgaccgaactgcgcacccgcctgctgcgctgcgttgccgtcattttcctgatctttgccgggctgttctccttcgcccagcagatctacaccctggtctcggcgcctctgcgcgaccatttgccggccaacgcgacgatgatcgccaccgacgtggcctcgccgttcctcacgccgttcaagctgaccatgatcgtgtcgctgttcctggccatcccgttcattctccagcagatctggggctttatcgcgccagggctgtaccgccatgaaaaacgcattgccattccactgctggtgtcgagcattctgttgttctacgccggtatggcctttgcctatttcctggtgttcccgctgatgttcaagttctttgccgccgccaccccggcaggcgtggcaatgatgaccgacatcgccaactacctcgacttcgtgatgacgctgttcttcgcctttggcgttgccttcgaaatcccggtggcggtggtgctgctggtgtggatcggcgtggtcgacgtgaagtacctgaagaagatccgcccctacgtgatcatcggctgtttcgtggtcggcatggtcctcaccccgccggacatcttctcccagactttgctggccgtgcccatgtggctgctgttcgaggtcggtgtgctgtgcggcagcctgatccgcaagcgtagtgcccacgacgaagaagccaacgaccacaacgaccagccacctgcgacccaaccgtga

SEQ ID NO: 6674 - protein, 262 aa, Pseudomonas putida GB-1
MSENPEHDQPMPLVSHLTELRTRLLRCVAVIFLIFAGLFSFAQQIYTLVSAPLRDHLPANATMIATDVASPFLTPFKLTMIVSLFLAIPFILQQIWGFIAPGLYRHEKRIAIPLLVSSILLFYAGMAFAYFLVFPLMFKFFAAATPAGVAMMTDIANYLDFVMTLFFAFGVAFEIPVAVVLLVWIGVVDVKYLKKIRPYVIIGCFVVGMVLTPPDIFSQTLLAVPMWLLFEVGVLCGSLIRKRSAHDEEANDHNDQPPATQP

SEQ ID NO: 6675 - DNA, 762 bp, Pseudomonas putida GB-1
  CDS (1)..(762): transl_table=11
atgagcagtgccatggacccgacggccagcatgccgttgaccgaacacctgcgcgacctgcgcaaacgcctggtgcgttgtctggggttggtggcattggtgttcgccggcctgttccccttcgcccaaacgctgtacacgctcatctccgagccgcttcggcgctttttgccggaaggcgcgagcatgatcgccaccagcgtcacctcgccgtttttgacgccgttcaagctgacagcgatgtgcgcactgttcgtggccatgccgctgctgctgcatcaggcctggggctttctggcaccggggttgtaccgccgtgaacggcgcattgccctgccgctgctggtgtcgagcatcgtgctgttctatgccggcatggcgttcgcgttcttcctggtgtttccgatgatgttcggcttttttgccagcgtgacaccggacggtgtggcgatgatgactgacatcagccagtacctggactttatcctggcgctgtttttggcattcgggctggcattcgagatcccggtggcgaccttcatcgtggtctgggtggggttggccgatgtggccacattgcggcgcagcaggccctacgtgatcgtcgggtgctttgtggtggggatgatcctgacgccgccggatgtgttttcgcagacgatgctagcggtgccgatgtggatactgttcgaggtgggattgctggcttgtgcctggttgaagcggcctgagcccggcaaggagattgtggccggcttatag

SEQ ID NO: 6676 - protein, 253 aa, Pseudomonas putida GB-1
MSSAMDPTASMPLTEHLRDLRKRLVRCLGLVALVFAGLFPFAQTLYTLISEPLRRFLPEGASMIATSVTSPFLTPFKLTAMCALFVAMPLLLHQAWGFLAPGLYRRERRIALPLLVSSIVLFYAGMAFAFFLVFPMMFGFFASVTPDGVAMMTDISQYLDFILALFLAFGLAFEIPVATFIVVWVGLADVATLRRSRPYVIVGCFVVGMILTPPDVFSQTMLAVPMWILFEVGLLACAWLKRPEPGKEIVAGL

SEQ ID NO: 6677 - DNA, 789 bp, Marinobacter sp. ELB17
  CDS (1)..(789): transl_table=11
atgacagaacagaccggggccgctaaccacgtgcccgaccagcctgaaatgccgctgattgaacatctactggaattgcgtaaccgcctgctgaagatggtgctggcggtggtggtgtgtttcgcctttatttacccgtttgccaacgaactttacctttggttgtctgaacctatccgcagcctgctgccggtgggccagagcatgattgccaccgatgttacctcgccgttttttgcccctctgaagctggccctcgtgctggcggtgtttgccgccatcccggtcattctgtaccagctttggagctttattgccccgggcctgtacacccatgagaaaaaaatagcctttccactgcttttttcgtcagtgctgctgttctatctgggtgctgcttttgcctactacgtggtgtttccactggttttcggtttctttacctcggttggccctgagggcattgtggaactgccagacatcaccagctatctgaatttcgtgttgaaaatgttctttgcctttggcgtggcgttcgagattccaattgccaccattctgctggttattaccggcatcaccacgccggatgacttggcggccaagcgcccttatgtggtggttggttgctttgttatcggcatgctgctgaccccgccggacattatctcgcaaaccttgctggcgctgcccatgtggattttgtttgagctcggcatcctgttcggccgcttgatgaagcgcaaagttgcgggtaccggcgaggaaaaagagcccggcagcgaatga

SEQ ID NO: 6678 - protein, 262 aa, Marinobacter sp. ELB17
MTEQTGAANHVPDQPEMPLIEHLLELRNRLLKMVLAVVVCFAFIYPFANELYLWLSEPIRSLLPVGQSMIATDVTSPFFAPLKLALVLAVFAAIPVILYQLWSFIAPGLYTHEKKIAFPLLFSSVLLFYLGAAFAYYVVFPLVFGFFTSVGPEGIVELPDITSYLNFVLKMFFAFGVAFEIPIATILLVITGITTPDDLAAKRPYVVVGCFVIGMLLTPPDIISQTLLALPMWILFELGILFGRLMKRKVAGTGEEKEPGSE

SEQ ID NO: 6679 - DNA, 813 bp, Erythrobacter sp. SD-21
  CDS (1)..(813): transl_table=11
atggctttcgacgtgaaggatatcgacgacagccaggcccccctgctcgaccatctgatcgagctgcgcggccgcttggtgcgctgcgtggcggcgctggtggtggcgtttggcgcatgcctctattttgccgaccaaatcctcggcttcctgattcagccgctcaagaaagccttcccggacgggcagggccagttgatcttcaccaagctttacgaggtcttcttcgtcgagctgaaagtcgcgctctttgcaggtttctgcatcgcctttccctatatcgcgaaccagctctgggccttcgtcgcacccgggctttacgcgaaggagaagaaggctttcctgcccttcctgttcgccacacccttcctgttcctcgccggggcgagccttgcgtattacgtggtcatgccgaccgccttcgagtggttcctcggcttcgagggcagcgcgggcgggttggaaattcaggcgctgccgacggcgaacgaatatctcggcctcgtgatgcagttcatcctcgctttcgggatgagcttcctgctgccggtcctgctgttgctgctccaccgcgcaggcatcgtgacgcgcgcgcaactggtcggcgcgcggcgctatgtcatcgtgctggtggtggctctggcggcgatcatcacgccgcccgacccgggctcgcagctgctgctcgccgtgccgttgctgctgctcttcgaaggctcgctggtcctaatgcgcattttcgagaagcgcgaagcgaaggcgaagtccgaggaagaggtgagcgagcccgaagccgatcagtcggcctcgtag

SEQ ID NO: 6680 - protein, 270 aa, Erythrobacter sp. SD-21
MAFDVKDIDDSQAPLLDHLIELRGRLVRCVAALVVAFGACLYFADQILGFLIQPLKKAFPDGQGQLIFTKLYEVFFVELKVALFAGFCIAFPYIANQLWAFVAPGLYAKEKKAFLPFLFATPFLFLAGASLAYYVVMPTAFEWFLGFEGSAGGLEIQALPTANEYLGLVMQFILAFGMSFLLPVLLLLLHRAGIVTRAQLVGARRYVIVLVVALAAIITPPDPGSQLLLAVPLLLLFEGSLVLMRIFEKREAKAKSEEEVSEPEADQSAS

SEQ ID NO: 6681 - DNA, 756 bp, Xanthomonas oryzae pv
  CDS (1)..(756): transl_table=11
gtgagcctgttcgacgacgcacaggccgaaagcagtctgatcgagcatctggtcgaattacgcgcccgcctggtgcgcgcgctgagcggtctgggcgtggtgctgttgaccttgctgccgttctcgcgggcgatttactcgtggctggctgcgccgctgatttcgcagctgccgctggggcagaccatgatcgcgatgaacccggccggtgcgttcttcgccccgctcaaactcactttcttcgtggcagtgttcttcagcgtgccgtggttgttgtatcaggcctgggcattcgtggcgccggggttgtaccagcgcgaaaagaaactggcatttccgctgctggcttcggcggtggcgctgttttacatcggctgtgcgttcgcgtatttcctggtgttgccggcggtgttccactttctgaccacgttcaagccggacgtgatcgccattaccccggacgccaattcgtacctggatttcgtcctggccatcttcttcgccttcggtgccagtttcgagctgccggtggcattggtgatcctggtgctgctgggctgggtcacgccgaagcaactcagtgagggccgcggctacgccatcgtcggcatcttcatcctggccgccgtgctcaccccgccagacgtcgtgtcgcagctgatgctggcccttccgatgtgcctgctctacgagctgggcatcatggcttcgcgtgcggtggcaccgaaggacgcggcgtccaacgctgctggttga

SEQ ID NO: 6682 - protein, 251 aa, Xanthomonas oryzae pv
MSLFDDAQAESSLIEHLVELRARLVRALSGLGVVLLTLLPFSRAIYSWLAAPLISQLPLGQTMIAMNPAGAFFAPLKLTFFVAVFFSVPWLLYQAWAFVAPGLYQREKKLAFPLLASAVALFYIGCAFAYFLVLPAVFHFLTTFKPDVIAITPDANSYLDFVLAIFFAFGASFELPVALVILVLLGWVTPKQLSEGRGYAIVGIFILAAVLTPPDVVSQLMLALPMCLLYELGIMASRAVAPKDAASNAAG

SEQ ID NO: 6683 - DNA, 1059 bp, Vitis vinifera
  CDS (1)..(1059)
  misc_feature (19)..(19): y is t or c
  misc_feature (235)..(235): r is g or a
  misc_feature (957)..(957): k is g or t
atgggaagcaccagtggtytcttctctcttcttcgcatcaacaactgctgtttttttaatcagctccaccctatcagacaccacaaacctcccctgcaaatccaccgcaggagagcaccgggctttgggccatctcagaggctccgccttagaaatttcagcacgcttgtttgttctgccgttgaagatgatgcgagggataagcagcagcaactgggtggcggtgttgggtcarttgttgaggagaggcctgtggctgaggactcaggtgaagatacactgcaaaacgttgaccaagataaaaaagaaaatggtctttatgattttctttatcccagtaaagagctcctgccagatgataaagaaatgtccatatttgatcatctagaggagctacgtcagagaatatttgtgtcagttttggcagttggagctgccatgttgggatcttttgcattttcaaaagaactggttatgattcttgaagctcctgttaaagaacagggtgttcgatttctgcaactggctcctggagagtttttctttacaactttgaaggtatcaggatactgtggtcttctcttggggagccccatcatcttatatgaaattatagcttttgttcttccaggtttaacaaaggcagagagaatgtttctggggccaattgtattagggtcctcagtacttttctacgctggtatcatcttctcctactcgattctcaccccggcagccttgaatttctttgttaattacgcagaaggagctgtggaatctttgtggtctattgatcaatactttgagtttgtctttgtgctcatgttcagcactggtttgtcttttcaggttccagtcatacaacttctactgggacaagttggtgtagtgtcaggagatcaaatgctgtcaatttggagatatgtcgtggttggtgctgttgtggctgctgcagtkcttactccatcaactgatcctctaactcaggtgcttctggcagggccccttttgggtctctacttgggtggggcatggatggtaaagcttatggggcggtga

SEQ ID NO: 6684 - protein, 352 aa, Vitis vinifera
  misc_feature (7)..(7): The Xaa at location 7 stands for Leu, or Phe.
  misc_feature (79)..(79): The Xaa at location 79 stands for Ile, or Val.
MGSTSGXFSLLRINNCCFFNQLHPIRHHKPPLQIHRRRAPGFGPSQRLRLRNFSTLVCSAVEDDARDKQQQLGGGVGSXVEERPVAEDSGEDTLQNVDQDKKENGLYDFLYPSKELLPDDKEMSIFDHLEELRQRIFVSVLAVGAAMLGSFAFSKELVMILEAPVKEQGVRFLQLAPGEFFFTTLKVSGYCGLLLGSPIILYEIIAFVLPGLTKAERMFLGPIVLGSSVLFYAGIIFSYSILTPAALNFFVNYAEGAVESLWSIDQYFEFVFVLMFSTGLSFQVPVIQLLLGQVGVVSGDQMLSIWRYVVVGAVVAAAVLTPSTDPLTQVLLAGPLLGLYLGGAWMVKLMGR

SEQ ID NO: 6685 - DNA, 837 bp, Ostreococcus tauri
  CDS (1)..(837)
atgacgacgacgacgcggaagacgcgcgcgttcgtggaggcgccgagcgagccggcgcagcgagagcaagtgcggagctttctgtatccgggggaggatcagctcccggatgacgtgtcgatgacgatctgggaacatctcgaggagcttcgcgagcgcgcgctcgtgagcgcggccgcggtggggtcgctcattttgctgtgcttttgctttgcgaaagatttgacaattttcctcgagcagcccgtggcgagccaaggggtgcggtttcttcaactcggtccgggtgagtacttcttcaccacggtcaaggttgcggggtacaccggtttgctcgcgggcgcgcccgtggtgctgtacgaggcgatcgcgtacgtcttaccgggtttgacgctgaacgagcgcaagacgctgggtccaatcgtgctcggttcctcggtgttgttttacggaggcatcgtcttcgcgtattacatcctggtacccgcggcgctcaaattctttgtcggttacgccgatggtgcggtcgagtcgctctggtccatcgatcagtactttgagttcgtcctcgtccttctcttctccaccggattgtcgttccaggtgcccgtgattcagctcttactcggacagactgggctcgtgagctctcaacagatgctcggtgtttggagatacgtcgtcgtgggctcggtcgtcgccgccgccgtcctcacaccgtcgacggatccgtttacgcagatgctgctcgccgtgccgctcatgtctctgtatttgggcggcgccgcgctcgtcggcgtcgtcgaaaaaggtagagacgccgacgccgccgcgtga

SEQ ID NO: 6686 - protein, 278 aa, Ostreococcus tauri
MTTTTRKTRAFVEAPSEPAQREQVRSFLYPGEDQLPDDVSMTIWEHLEELRERALVSAAAVGSLILLCFCFAKDLTIFLEQPVASQGVRFLQLGPGEYFFTTVKVAGYTGLLAGAPVVLYEAIAYVLPGLTLNERKTLGPIVLGSSVLFYGGIVFAYYILVPAALKFFVGYADGAVESLWSIDQYFEFVLVLLFSTGLSFQVPVIQLLLGQTGLVSSQQMLGVWRYVVVGSVVAAAVLTPSTDPFTQMLLAVPLMSLYLGGAALVGVVEKGRDADAAA

SEQ ID NO: 6687 - DNA, 819 bp, Magnetospirillum gryphiswaldense
  CDS (1)..(819): transl_table=11
atgagcgacgacaagaccatgcccttgctcgaccatctggtcgagttgcgccgccgcctgttgtggtcggtgctggccttcgtcgtcgtcttcgccggctgtttctatttcgccgccgacatctactccatcctgatggacccttatgccaaggtggccctggataagggcggcatgcgccggctgatctatacggcgccgaccgaggccttcttcacctatgtcaaggtgtcggccttcgccgccggcgtcctttgctttccggtgtgggccggccagttgtgggcgttcgtcgcccctggtctctacaagaacgaacgtcaggccttcatgccgttcctgttcgccaccccggtattgttcagcctgggtgccgccctggtgtacttcctggtcctgcccatgctgtacacctatctgctgggcttcgaaaatctggtgccgcatcagggtgagttgcccattcaattggaagccaaggtcagcgaatcgctgtccctgatcatgaccctgatcttcgccttcggcctcgccttccagatgccggtgctgctgacgcttttggcccgcgtcggtctggtcaccgccaaggggctgaaggaaaagcgccgctacgccatcgtcggcgtcttcgtcttcgctgcggtggtcaccccgcccgatgtggtcagccagttgtccctggccgtgcccatggtgattttgtacgaattgtcgatcatttccgcccgtatggcggaaaagaagcgcggcgaaccctcggaagaggatgaggccgacgaagacgaccctgtggacgagaccgatttcaacgcttaa

SEQ ID NO: 6688 - protein, 272 aa, Magnetospirillum gryphiswaldense
MSDDKTMPLLDHLVELRRRLLWSVLAFVVVFAGCFYFAADIYSILMDPYAKVALDKGGMRRLIYTAPTEAFFTYVKVSAFAAGVLCFPVWAGQLWAFVAPGLYKNERQAFMPFLFATPVLFSLGAALVYFLVLPMLYTYLLGFENLVPHQGELPIQLEAKVSESLSLIMTLIFAFGLAFQMPVLLTLLARVGLVTAKGLKEKRRYAIVGVFVFAAVVTPPDVVSQLSLAVPMVILYELSIISARMAEKKRGEPSEEDEADEDDPVDETDFNA

SEQ ID NO: 6689 - DNA, 768 bp, Bacillus licheniformis
  CDS (1)..(768): transl_table=11
atgaagggaaaagaaatgtcgctgttagaacatatcacagaactgcgcagacggcttgtgatcacttttttcttttttgttttgtttgttgcggcaggcttttttttggcgaagccgctcataatctacctgcagcagacggatgaagcgaagctgctgactctcaatgcgttcaagctgaccgatcctttatttgtgtacgtgcagttcgcgttcatcatcggcgctgtcttgacttcgccgcttgttctataccagctgtgggctttcatcagcccggggctgtatgaaaaagaacgaaaagtgacgctcagctatattccaatatcgatcattctttttttaggcggcattgccttttcttactttattttatttccgtttgtcgtggactttatgacgagagtctcagatgatctgaatgtcaaccaggtcatcggaatacacgaatattttcagtttctgcttcagttgacgcttccttttggcttgttgtttcagatgcctgtggtcatcatgtttatcacaaggctcggtctcgtgacgccgatgtttttggcgaaaatccgaaaatatgcatattttgtgttgttcgtcattgcggcgctcattacaccgcctgagttattgtcgcatttaatggtctccgtgccattgctcattctttatgaaatcagtatcgtgatttcaagaatatcctacaggcaggcgcaaaaaacaatgattcaagaggaaaatcaatcgtttttgaacgaccatacaaaataa

SEQ ID NO: 6690 - protein, 255 aa, Bacillus licheniformis
MKGKEMSLLEHITELRRRLVITFFFFVLFVAAGFFLAKPLIIYLQQTDEAKLLTLNAFKLTDPLFVYVQFAFIIGAVLTSPLVLYQLWAFISPGLYEKERKVTLSYIPISIILFLGGIAFSYFILFPFVVDFMTRVSDDLNVNQVIGIHEYFQFLLQLTLPFGLLFQMPVVIMFITRLGLVTPMFLAKIRKYAYFVLFVIAALITPPELLSHLMVSVPLLILYEISIVISRISYRQAQKTMIQEENQSFLNDHTK

SEQ ID NO: 6691 - DNA, 828 bp, Rhizobium leguminosarum bv
  CDS (1)..(828): transl_table=11
atgagcggtgatatcgaagacaagccgcagccgttgatcgagcacctgatggagctgcgcacgcggctgatgtggtcgatcggcgcctttttcgtcgccttcatcgcatgcttcttttttgccaagcatctcttcaactatctggtcataccctacaagacagccgtcgtgtgggcgcatctcgacgtcgagaaagcccagctcatctacaccgcgccgcaggaattcttcttcacgcaggtcaaggtggcgatgttcggcggccttgtggtcgcgttcccgatcattgccgcccaggtctacaagttcgtggcgccgggtctctacaagaatgagcgccaggctttcctgccgttcctgatcgcctcgccggtcctgttcctgatgggcggcgcgctcgtctatttcttcttcacgccgatggtcatgtggttcttcctgtcgatgcagcaggcgccaggtcatgacgaaatagcgatctcgctgatgccgaaggtctcggaatatctgagcctgatcatgacgctggtcttctccttcggcctcgtcttccagcttcccgtcgtcaccacgctgcttgctcgtgtcggtcttctgacgtcgcaatggctcgccgaaaagcgcaagtttgccatcgtcctcgcctttgttgtcgccgccgtgctgacgccgccggatccgatgtcccagatcggccttgcgataccgacgatccttctctacgagatttccatccatgcggcgcgactcgtggagcgccagcgtgcccggcaggcggtcgaaaaggaaactggatccgcagacgttgccaagacggacagcgtctga

SEQ ID NO: 6692 - protein, 275 aa, Rhizobium leguminosarum bv
MSGDIEDKPQPLIEHLMELRTRLMWSIGAFFVAFIACFFFAKHLFNYLVIPYKTAVVWAHLDVEKAQLIYTAPQEFFFTQVKVAMFGGLVVAFPIIAAQVYKFVAPGLYKNERQAFLPFLIASPVLFLMGGALVYFFFTPMVMWFFLSMQQAPGHDEIAISLMPKVSEYLSLIMTLVFSFGLVFQLPVVTTLLARVGLLTSQWLAEKRKFAIVLAFVVAAVLTPPDPMSQIGLAIPTILLYEISIHAARLVERQRARQAVEKETGSADVAKTDSV

SEQ ID NO: 6693 - DNA, 840 bp, Acidianus ambivalens
  CDS (1)..(840): transl_table=11
gtgacggaaagaactgaacttaaaagagacgaagagaagcctcttttgtcgcatattgcagaattagcgatgagactaaggagaggacttatcagtctttttttggcattcgtaatattttttgcctttggatatactactataaatattggcggatatactgttcccatcttatatcctagtttatttcacagtttagccgacagtctaatgttattttttattcaccatgagctaccaaaagggatggaattacttaacttaaatccattcgatcctctatatgcctctgcatatacttctttctatttagcattatttatttcccttccaataatttttagagagttatggggtttcgtttctccagggttatatgagcatgagaaaaagttggttaaatatataatattccctgccgcgttactttttgctgctggttctctttttgcttattttataatagttcctttgatgatgaagttcgtagttttatataccacagccttgggcgttgagccgacgcttagtttaagagccttcgtctcaactgtagtttcccttatgatggttaccggaatagccttcgagtacccactagcgatgtcgatactaacttacgtcggaatggttaaggctgatagctggaagaagaattggagatggggagtgatgggagcttttatcatagcctggattatttctcccggaacaacaggaggagtaattgagactacaataggagttatactctcagtattatatttcgtaggagtagcctcagcaaaaataatagaaaaaaggaagatcaaaaggaatgaagaaacaatacaaaggtaa

SEQ ID NO: 6694 - protein, 279 aa, Acidianus ambivalens
MTERTELKRDEEKPLLSHIAELAMRLRRGLISLFLAFVIFFAFGYTTINIGGYTVPILYPSLFHSLADSLMLFFIHHELPKGMELLNLNPFDPLYASAYTSFYLALFISLPIIFRELWGFVSPGLYEHEKKLVKYIIFPAALLFAAGSLFAYFIIVPLMMKFVVLYTTALGVEPTLSLRAFVSTVVSLMMVTGIAFEYPLAMSILTYVGMVKADSWKKNWRWGVMGAFIIAWIISPGTTGGVIETTIGVILSVLYFVGVASAKIIEKRKIKRNEETIQR

SEQ ID NO: 6695 - DNA, 1005 bp, Corynebacterium glutamicum
  CDS (1)..(1005): transl_table=11
gtggttaagcgccctcggcgagttatctcaaaaaagaagaagaagtctcctacgggagagatgtccattgttgagcacatcaaagagtttcgacgccgacttcttatcgctctggcgggcatcctcgtgggcaccattatcggctttatttggtacgatttctcattttggcagatccccactttgggcgagctgctgagggatccgtactgttctctgcctgctgaatcccgctgggccatgagcgactcagaggaatgtcgactgctcgcaaccggcccgtttgatccattcatgcttcgccttaaagtagcggcgttggtgggtatggttcttggctcacccgtgtggctgagccagctgtggggctttatcaccccaggtttgatgaagaatgagcgccgttacaccgcaatcttcgtcacgattgctgttgtgctgtttgtcggcggtgctgttcttgcgtacttcgtcgttgcatatggtttggagttcctccttaccattggtggagacacccaggcagcggccctgactggtgataagtacttcggattcttgctcgcgttgttggcgattttcggcgtgagcttcgaagttccactggtgatcggcatgctcaacattgtgggtatcttgccttacgatgccattaaagataagcgacgcatgatcatcatgattttgttcgtgttcgctgctttcatgacacccggccaggatcctttcaccatgttggtgttggcgctttcactcaccgttctggtagagcttgccctgcagttctgtcgtttcaacgacaaacgccgggacaagaagcgcccagaatggcttgatggcgatgacctctctgcatcaccactggatacttctgctggtggagaagatgctccaagcccagtcgaaaccccagaggcggtggagccttcgcggatgctgaacccaagtggggaggcgtcgataagctataaacccgggcgcgccgacttcggtgacgtgctctag

SEQ ID NO: 6696 - protein, 334 aa, Corynebacterium glutamicum
MVKRPRRVISKKKKKSPTGEMSIVEHIKEFRRRLLIALAGILVGTIIGFIWYDFSFWQIPTLGELLRDPYCSLPAESRWAMSDSEECRLLATGPFDPFMLRLKVAALVGMVLGSPVWLSQLWGFITPGLMKNERRYTAIFVTIAVVLFVGGAVLAYFVVAYGLEFLLTIGGDTQAAALTGDKYFGFLLALLAIFGVSFEVPLVIGMLNIVGILPYDAIKDKRRMIIMILFVFAAFMTPGQDPFTMLVLALSLTVLVELALQFCRFNDKRRDKKRPEWLDGDDLSASPLDTSAGGEDAPSPVETPEAVEPSRMLNPSGEASISYKPGRADFGDVL

SEQ ID NO: 6697 - DNA, 1062 bp, Pisum sativum
  CDS (1)..(1062)
atgggtttgggaaccaccactgttcctacgaacatccttcctcaattcgggttgcaccgaacccacttaaaccccatccgggtcaacaattcgaccgggttcagctaccctctctctctaagaaagaacaagagttttgatagactcgtttgtttcgccgttgatgacgaaatcagagagaagcaacaacaacagttgagtactagttccactagacttggctccgccgttgaagaaagacccgagaataaagatatgattgatggtataagtgaagaagcattggaaaattttaaggaagatggggaaagaagtgctatctacgattttctttatcctagtaaagagcttctacccgatgataaagagatgagcatatttgatcaccttgaagagctacgagagagaatctttatatcagttctgggagttggaggaagcattttgggatgctttgcgttttcaaaagatttggtaaagattctcgaagctcctgttaaatcagaaggtgtccgatttcttcagcttgctcctggtgaatttttcttcaccactttaaaggtgtctggatactgtggcctcctcttgggaagtcccatcattctctacgaaatcatagcctttataattccaggtctaacgaaagaagaaagaaagtttctcgggccaattgttttaggctcatccgttcttttttatgccggaataaccttctcctacttagttttggtacctgcggcattaaatttctttgtcaattacgccgaaggcgctgttgaatcattatggtccattgatcaatactttgagtttgttctggttcttatgttcagcacaggcttgtctttccaggtgcctattatacaacttctattgggacaacttggattggtatctggagacaagatgctatcggtatggaggtatgttgtagtcggcgcagtagtggcagcagctgtagttacaccatcgacagatcctctgactcaagttcttctagcggcgcccttattaggcctttacttgggtggtgcatggatggtcaaactcgctggacggtaa

SEQ ID NO: 6698 - protein, 353 aa, Pisum sativum
MGLGTTTVPTNILPQFGLHRTHLNPIRVNNSTGFSYPLSLRKNKSFDRLVCFAVDDEIREKQQQQLSTSSTRLGSAVEERPENKDMIDGISEEALENFKEDGERSAIYDFLYPSKELLPDDKEMSIFDHLEELRERIFISVLGVGGSILGCFAFSKDLVKILEAPVKSEGVRFLQLAPGEFFFTTLKVSGYCGLLLGSPIILYEIIAFIIPGLTKEERKFLGPIVLGSSVLFYAGITFSYLVLVPAALNFFVNYAEGAVESLWSIDQYFEFVLVLMFSTGLSFQVPIIQLLLGQLGLVSGDKMLSVWRYVVVGAVVAAAVVTPSTDPLTQVLLAAPLLGLYLGGAWMVKLAGR

SEQ ID NO: 6699 - DNA, 717 bp, Legionella pneumophila
  CDS (1)..(717): transl_table=11
atgttaattcatttaattgaattacggcaaagagcaatctatacccttctctggtttggcgctttagcgctattgttttttttcatatcagaccaactgtttcatctcctggtaaagccgttattgcgatctttaccgaatcaagagggcttgattgccacacagattacttcctcggttttcacccctttaaaacttgcagtggataccgctttgttgctcactgctccgtttgctttattgcaactttggcgttttatgcgcccgggactctataaaaacgagcaggaacaaatcagaggcaccatcattttaagtcttttgctctttgtctttggggcactattttgcttttatcttgtcctcccttatatgttccagttttttgctcaggcccttccggaaggagtgcgactcatgcctgacatggcttacgccatagatttcattacacgcatgctgcttttatttggtttttcttttcaggttccactaatttgtcttgtactggtaaaaacccatttcactacagttgagacacttataaaaatcaggccttatgtgatagttggggcatttattattggtatgctactcaccccccctgatgttttttctcaagttgcattagcattgcctttgtgtttgctttatgaggcggggattattttagccaggatttatgggaaatcccccatgcccactttaattcagtaa

SEQ ID NO: 6700 - protein, 238 aa, Legionella pneumophila
MLIHLIELRQRAIYTLLWFGALALLFFFISDQLFHLLVKPLLRSLPNQEGLIATQITSSVFTPLKLAVDTALLLTAPFALLQLWRFMRPGLYKNEQEQIRGTIILSLLLFVFGALFCFYLVLPYMFQFFAQALPEGVRLMPDMAYAIDFITRMLLLFGFSFQVPLICLVLVKTHFTTVETLIKIRPYVIVGAFIIGMLLTPPDVFSQVALALPLCLLYEAGIILARIYGKSPMPTLIQ

SEQ ID NO: 6701 - DNA, 804 bp, Pseudomonas stutzeri
  CDS (1)..(804): transl_table=11
atgagcaagtcttctatcaacgatcaggaaatgccgctggtcgctcatctgaccgagctgcgcaagcgcctgttgcactgcgtggtcgccatcggcctcttgttcgccgggttgttctacttctcccagcagatctacgcgctggtcgctgctccgctgcgcgcctatttgccggaaggcgcgacgatgattgccactggcgtcgcctcacccttcctgacgccgttcaagctcacgctgatggtcgcgctgtttctctcgatgccggtcatcctgcatcagatctggggcttcatcgcgcccggcctgtacaagcacgaaaagcgcatcgccgtgccgctgctcgtatcgagcatcttcctgttctacgccggcatggcattcgcttatttcgtggtgttcccgatcatgttcggcttcttcgccagcgtgacgccagagggcgtggcgatgatgacggatatcgggcagtacctggatttcgtgctcacgctgttcttcgccttcggcgtggcgttcgagattccagtagcaacctttctgctgatctgggttggcatcgttgatgtggccacgctgcgcaagagccgcccctacgtgatcgtgggctgcttcgccgtcggcatggtactgacgccaccggacgtcttctcgcaagcgctactcgccgtacccatgtggctgctgttcgaagccggcgtgatttgcgggaggttgatcaagaagcgcgacgagcacttccgtggtgatgcagacgacgacgcgccggacgccagcgaccagcctccagcttcgcgcccgtga

SEQ ID NO: 6702 - protein, 267 aa, Pseudomonas stutzeri
MSKSSINDQEMPLVAHLTELRKRLLHCVVAIGLLFAGLFYFSQQIYALVAAPLRAYLPEGATMIATGVASPFLTPFKLTLMVALFLSMPVILHQIWGFIAPGLYKHEKRIAVPLLVSSIFLFYAGMAFAYFVVFPIMFGFFASVTPEGVAMMTDIGQYLDFVLTLFFAFGVAFEIPVATFLLIWVGIVDVATLRKSRPYVIVGCFAVGMVLTPPDVFSQALLAVPMWLLFEAGVICGRLIKKRDEHFRGDADDDAPDASDQPPASRP

SEQ ID NO: 6703 - DNA, 906 bp, Streptomyces lividans
  CDS (1)..(906): transl_table=11
atgccgctcgcggaacaccttcgtgagctccgcaaccggctcgcgaaggcgctgctggccatcgtcgtcgtcacggtggtcgccgccttcttctatcagtggatcatcaacgccctcacggatccgatcctccagtcgatcggctgtgagaagtcgttcgcggagctggcccagtcggaggccggctcggagccgtgcgcgcagatcaccatcaacggtctgctcggccccttcaccctggcgctgaaggtgtccctgacggccggtgtcgtgctggcctcgccggtctggctctaccagctgtgggcgttcgtcgccccggggctgcacaggaacgagaagaagtacgcctacgctttcgtcgccaccggcgccccgctcttcctcgccggcgcgtacttcgcctacgcggtgctccccacctcggcgaaggtgctgatcgagttcacgccgaacgacgtcgacaacctgctgccgctggacgagctgctcgacctcgtcacgcgcatggtggtcgtcttcggtctctccttcgagctgcccctgctgctggtcatgctcaacttcaccggcgtgctgaccggcaagcggatgctcggctggtggcgcgcgatgatcatgggcatcacgctgttcgcggccatcgccacgcccagcaccgacccgctgacgatgatcatgctggccggtccgatctgggttctgtacttcgccgcggtcgtcgtctccctgctgaacgaccgccgcaaggcccgcctcgaggccctggagcccgacgacgacgaggcgtccgacctggacctcacccccgaggacatcggcgaggtcgagcccgtgaccaccgcccgtgccctgcccgagcaggccacgaaggaccgggtcaacggctacgacgacgtgacctga

SEQ ID NO: 6704 - protein, 301 aa, Streptomyces lividans
MPLAEHLRELRNRLAKALLAIVVVTVVAAFFYQWIINALTDPILQSIGCEKSFAELAQSEAGSEPCAQITINGLLGPFTLALKVSLTAGVVLASPVWLYQLWAFVAPGLHRNEKKYAYAFVATGAPLFLAGAYFAYAVLPTSAKVLIEFTPNDVDNLLPLDELLDLVTRMVVVFGLSFELPLLLVMLNFTGVLTGKRMLGWWRAMIMGITLFAAIATPSTDPLTMIMLAGPIWVLYFAAVVVSLLNDRRKARLEALEPDDDEASDLDLTPEDIGEVEPVTTARALPEQATKDRVNGYDDVT

SEQ ID NO: 6705 - DNA, 741 bp, Synechococcus sp
  CDS (1)..(741): transl_table=11
atgcccccaacccgagtccccagatccatgcgggagattcccgatgaagcagaaatgtcctttttcgatcacctcgaagaactccgctggcgcattttttattcgctgatttccgttgttgtcggttgggtcggttgtttcttttttgtcaaaccccatcgtccagatcttagaagcgcctgctgtggggtgaaattcatccaggtggcccccggcgaatttttctttctctcgtttaaggtggcgggctacaccggcgctttactggcgagtccttttatcctgtaccaaattattcagtttgttttgccggggctaaccaggggagaacggcgtctcctcgctcccgttgtcttggggtctggtgtgctgttttttgcgggcttggcctttgcctacgttgctttgattccagcggctctgaattttttcattacctatggtgctgatgtcgtagaggcggcctggtctattgaacggtattttgagttggtgctgggtctgatgttttttacggggctagcgtttcaggtgcctgtggtgcaaatgatcttgtcttggttggggattgtttcttcgagcctgatgctcaagggttggcgctttgtcgttctgggggcagtggtgctcggcgcggtgattacgccctcgacagatccgatgacccaatcactcttggctggggccgtcatgggcttatattttggcggcattggcattgtgaaactttcaggacgctag

SEQ ID NO: 6706 - protein, 246 aa, Synechococcus sp
MPPTRVPRSMREIPDEAEMSFFDHLEELRWRIFYSLISVVVGWVGCFFFVKPHRPDLRSACCGVKFIQVAPGEFFFLSFKVAGYTGALLASPFILYQIIQFVLPGLTRGERRLLAPVVLGSGVLFFAGLAFAYVALIPAALNFFITYGADVVEAAWSIERYFELVLGLMFFTGLAFQVPVVQMILSWLGIVSSSLMLKGWRFVVLGAVVLGAVITPSTDPMTQSLLAGAVMGLYFGGIGIVKLSGR

SEQ ID NO: 6707 - DNA, 738 bp, Bacillus subtilis
  CDS (1)..(738): transl_table=11
atggataaaaaagaaacccatctgatcgggcatttagaagagcttcgccgccggattatcgtcacccttgcggcattttttctatttctcatcacggcttttttgttcgtacaggacatttatgactggctgatcagggatttggatggaaagctggctgtgctaggaccgagtgaaatcctctgggtgtatatgatgctttccggcatttgtgccattgcggcttctatccctgttgccgcgtaccagctgtggcgtttcgttgcaccggcgctgactaaaacggagcgcaaggtgacgatcatgtacatcatgtacataccaggtttatttgcgttgtttttggcgggcatctccttcggatactttgtcttgtttccgatcgtgctcagctttttgactcatttatcctccggccactttgaaacgatgtttacggctgaccgctactttaggtttatggtgaatttgagcctgccgttcggcttcttgtttgagatgcccttggtggtgatgtttttaacaaggctgggcatcttaaatccttacagactggccaaagcgagaaagctttcctattttctgctgattgtcgtgtccatattgattacaccgcctgattttatttctgattttctcgtgatgatcccgcttcttgtcctgtttgaagtgagtgtcaccctatcggcgtttgtctacaaaaagaggatgagggaagaaacagcggcggccgcttag

SEQ ID NO: 6708 - protein, 245 aa, Bacillus subtilis
MDKKETHLIGHLEELRRRIIVTLAAFFLFLITAFLFVQDIYDWLIRDLDGKLAVLGPSEILWVYMMLSGICAIAASIPVAAYQLWRFVAPALTKTERKVTIMYIMYIPGLFALFLAGISFGYFVLFPIVLSFLTHLSSGHFETMFTADRYFRFMVNLSLPFGFLFEMPLVVMFLTRLGILNPYRLAKARKLSYFLLIVVSILITPPDFISDFLVMIPLLVLFEVSVTLSAFVYKKRMREETAAAA

SEQ ID NO: 6709 - DNA, 765 bp, Bacillus subtilis
  CDS (1)..(765): transl_table=11
atgacacgaatgaaagtgaatcaaatgtcgctgctggagcatattgctgagcttcgaaaacggttgctgattgtagcgctggcgtttgtcgttttctttattgctggattttttttagcaaagccgattattgtgtatctgcaagaaacagatgaagcgaagcagcttacgcttaacgcgtttaacctgacagacccgctttatgtgtttatgcaatttgcgtttatcatcggcatagtcttgacctcgccggttattctttatcagctttgggcttttgtgagcccgggcctctatgagaaagagcgcaaagtaacgctcagctacattccggtctctattttgctgtttttagcgggcttatctttttcatattatattttatttccttttgttgttgattttatgaagcggatttctcaggacttgaatgtcaatcaggtgatcggaattaatgaatattttcattttcttctgcagctgacgattccgtttggactgctgttccaaatgccggtcatcctcatgtttttgacaaggctcggaattgtgacaccgatgttcttggcgaaaatcagaaagtatgcgtattttacgctgctggtgatcgcagccctgattacaccgcctgagcttctgtcccatatgatggtcacagtcccgcttttgattttatatgaaatcagtatccttatatcgaaggccgcttatcggaaagcacagaaaagcagtgctgccgatcgggacgtgtcttctgggcaataa

SEQ ID NO: 6710 - protein, 254 aa, Bacillus subtilis
MTRMKVNQMSLLEHIAELRKRLLIVALAFVVFFIAGFFLAKPIIVYLQETDEAKQLTLNAFNLTDPLYVFMQFAFIIGIVLTSPVILYQLWAFVSPGLYEKERKVTLSYIPVSILLFLAGLSFSYYILFPFVVDFMKRISQDLNVNQVIGINEYFHFLLQLTIPFGLLFQMPVILMFLTRLGIVTPMFLAKIRKYAYFTLLVIAALITPPELLSHMMVTVPLLILYEISILISKAAYRKAQKSSAADRDVSSGQ

SEQ ID NO: 6711 - DNA, 768 bp, Azotobacter chroococcum mcd 1
  CDS (1)..(768): transl_table=11
atgacagcccgaccggacagcgaccaggacatgcccctggtcgcgcacctgaccgagctgcgctcgcgcctgctgcgcagcgtggcggcagtgctgctgatcttcgccgcactcttctacttcgcccaggacatctacgccctggtctcggcgcccctgcgcgcctacctgccggaaggcgcgaccatgatcgccaccggcgtggcctcgccgttcctcgcgccgttcaagctgaccctgatgatctcgctgttcctcgccatgccggtggtcctccaccaggtctggggcttcatcgcgccggggctgtaccagcacgagaaacgcatcgccatgccgttgatggcctccagcgtgctgctcttctatgccggcatggccttcgcctacttcgtggtcttcccgatcatgttcggcttcttcgccagcgtgaccccggaaggcgtggcgatgatgaccgatatcggccagtacctggacttcgtgctcaccctgttcttcgccttcggtgtggccttcgaggtgccggtggcgaccttcctgctgatctgggtgggcatcgtcgacgtggcaagcctgcgcaacagtcgcccctacgtgatcgtcggctgcttcgtggtcggcatggtcctcaccccgccagacgtgttctcccagaccctgctcgccgtgcccatgtggctgctgttcgagatcggcgtgttcttcggcgcgcggatccgccaccgcgaggagccggccgcctccgacggcccgtcgcaaccgtga

SEQ ID NO: 6712 - protein, 255 aa, Azotobacter chroococcum mcd 1
MTARPDSDQDMPLVAHLTELRSRLLRSVAAVLLIFAALFYFAQDIYALVSAPLRAYLPEGATMIATGVASPFLAPFKLTLMISLFLAMPVVLHQVWGFIAPGLYQHEKRIAMPLMASSVLLFYAGMAFAYFVVFPIMFGFFASVTPEGVAMMTDIGQYLDFVLTLFFAFGVAFEVPVATFLLIWVGIVDVASLRNSRPYVIVGCFVVGMVLTPPDVFSQTLLAVPMWLLFEIGVFFGARIRHREEPAASDGPSQP

SEQ ID NO: 6713 - DNA, 738 bp, Campylobacter jejuni
  CDS (1)..(738): transl_table=11
atgtttgaagaattaagacctcatttaatagaacttagaaaacgcctttttataagcgttgcttgcattgtagttatgtttattgtatgttttgctctacgaagctatatcttagatattctaaaagctccacttatagctgttttacccgaagtagccaaacatgtgaatgtaattgaagtacaagaagccttatttaccgcaatgaaggttagtttttttgcagcctttatcttttctctacctgtaattttttggcaattttggaaatttgtagctccaggactttatgataatgaaaaacgccttgtagtgccttttgttagctttgcaagcattatgtttgcctttggggcttgtttttgctattttgttgtagtgcctttggcttttaaatttttgattaattttggtttaaatgaagattttaatcctgtgattaccataggaacttatgtagatttttttaccaaagttgttgtggcttttggcttagcttttgaaatgcctgtaattgcctttttctttgctaaaatcggacttatagatgatagttttttaaaacgccattttcgcatagctgttttagttatttttgttttttcagcctttatgactccacctgatgttttatctcaatttttaatggcaggaccactttgcggactttatggactttctattttaattgttcaaaaggtaaatcctgctccaaaagataaagaaagtgatgaataa

SEQ ID NO: 6714 - protein, 245 aa, Campylobacter jejuni
MFEELRPHLIELRKRLFISVACIVVMFIVCFALRSYILDILKAPLIAVLPEVAKHVNVIEVQEALFTAMKVSFFAAFIFSLPVIFWQFWKFVAPGLYDNEKRLVVPFVSFASIMFAFGACFCYFVVVPLAFKFLINFGLNEDFNPVITIGTYVDFFTKVVVAFGLAFEMPVIAFFFAKIGLIDDSFLKRHFRIAVLVIFVFSAFMTPPDVLSQFLMAGPLCGLYGLSILIVQKVNPAPKDKESDE

SEQ ID NO: 6715 - DNA, 777 bp, Escherichia coli O157
  CDS (1)..(777): transl_table=11
atgtctgtagaagatactcaaccgcttatcacgcatctgattgagctgcgtaagcgtctgctgaactgcattatcgcggtgatcgtgatattcctgtgtctggtctatttcgccaatgacatctatcacctggtatccgcgccattgatcaagcagttgccgcaaggttcaacgatgatcgccaccgacgtggcctcgccgttctttacgccgatcaagctgacctttatggtgtcgctgattctgtcagcgccggtgattctctatcaggtgtgggcatttatcgccccagcgctgtataagcatgaacgtcgcctggtggtgccgctgctggtttccagctctctgctattttatatcggcatggcgttcgcctactttgtggtctttccgctggcatttggcttccttgccaataccgcgccggaaggggtgcaggtatccaccgacatcgccagctatttaagcttcgttatggcgctgtttatggcgtttggtgtctcctttgaagtgccggtggcaattgtgctgctgtgctggatggggattacctcgccagaagacttacgcaaaaaacgcccgtatgtgctggttggtgcattcgttgtcgggatgttgctgacgccgccggatgtcttctcgcaaacgctgttggcgatcccgatgtactgtctgtttgaaatcggtgtcttcttctcacgcttttacgttggtaaagggcgaaatcgggaagaggaaaacgacgctgaagcagaaagcgaaaaaactgaagaataa

SEQ ID NO: 6716 - protein, 258 aa, Escherichia coli O157
MSVEDTQPLITHLIELRKRLLNCIIAVIVIFLCLVYFANDIYHLVSAPLIKQLPQGSTMIATDVASPFFTPIKLTFMVSLILSAPVILYQVWAFIAPALYKHERRLVVPLLVSSSLLFYIGMAFAYFVVFPLAFGFLANTAPEGVQVSTDIASYLSFVMALFMAFGVSFEVPVAIVLLCWMGITSPEDLRKKRPYVLVGAFVVGMLLTPPDVFSQTLLAIPMYCLFEIGVFFSRFYVGKGRNREEENDAEAESEKTEE

SEQ ID NO: 6717 - DNA, 762 bp, Helicobacter pylori
  CDS (1)..(762): transl_table=11
atgtttgaagatttaaaaccgcatttacaggaattaagaaagcgtttgatggtttctgtaggaacgattctagtggcgtttttggggtgctttcatttttggaaaagtatttttgaatttgttaaaaattcctataaaggcacgctcattcagctctcccctattgaaggggtcatggtagcggttaaaatcagtttttcagccgctatcgtcatttccatgcccattattttttggcaattatggctctttatcgctccagggctttacaagaatgaaaaaaaagtgattttgccttttgtgttttttgggagtgggatgtttttgattggggcggcgttttcttattatgtggtgttccctttcattattgaatacttagccacttttgggagcgatgtgtttgcggctaatatttctgcgtccagttacgtgagctttttcacgcgcttgattttaggctttggcgtggcgtttgaattgcctgttttggcgtattttttggctaaagtgggcttgattactgatgcgagcttgaaagcgtattttaaatacgctattgtagtgatttttattgtagcagccattatcactccccctgatgtggtgagtcaaatctttatggcgttgcccttagtggggctttatgggctttctattttaatcgccaaaatggtcaatccggctcccaaagataacgaaaataacaacgaaaataataacgaaaataacaccaaagagaatacaaagagcgagtcgtag

SEQ ID NO: 6718 - protein, 253 aa, Helicobacter pylori
MFEDLKPHLQELRKRLMVSVGTILVAFLGCFHFWKSIFEFVKNSYKGTLIQLSPIEGVMVAVKISFSAAIVISMPIIFWQLWLFIAPGLYKNEKKVILPFVFFGSGMFLIGAAFSYYVVFPFIIEYLATFGSDVFAANISASSYVSFFTRLILGFGVAFELPVLAYFLAKVGLITDASLKAYFKYAIVVIFIVAAIITPPDVVSQIFMALPLVGLYGLSILIAKMVNPAPKDNENNNENNNENNTKENTKSES

SEQ ID NO: 6719 - DNA, 927 bp, Mycobacterium bovis
  CDS (1)..(927): transl_table=11
gtgcgcgccgccggtcttctcaaacggctcaacccacgtaacaggcgcagccgcgtcaatcctgacgcgacgatgtcgctggtcgaccacctgaccgagttacgcaccaggttgctgatctccctggccgcgatcttggtcaccacaatcttcgggttcgtctggtattcgcattcgattttcgggttggacagcctcggagagtggctgcggcatccctactgtgccctgccgcagtcggcccgggcggatatcagcgccgacggagagtgccgtttgttggccaccgcgccgttcgaccagttcatgttgcggctcaaggtcgggatggccgccggcattgtgctggcttgcccggtgtggttctaccagctgtgggcgttcatcacgcctggtctctaccagagggagcgccgcttcgcggtggccttcgtgatcccagcagcggtgctgttcgtcgccggtgccgtactggcctacctggtgttgtccaaggcgttgggctttttgttgaccgtcggcagcgacgtgcaggtgaccgcgctgtctggcgaccgctactttggctttctgctcaacctgctggtggtgttcggggtcagcttcgaattccccctgctgatcgtgatgctgaacctggcgggcctgctgacctatgagcggctcaagtcttggcggcgcgggttgatctttgcgatgttcgtcttcgcggcgatcttcacgcccggatccgatccgttctcgatgaccgcgctcggtgcggcgttgaccgtgctgctagagctcgccattcagatcgcccgcgtgcatgacaagcgaaaagccaagcgcgaagccgcgattcccgacgacgaagcttcggtcatcgacccgccctcgccggtgccggcgccatcggtcatcggatctcatgacgacgtcacgtag

SEQ ID NO: 6720 - protein, 308 aa, Mycobacterium bovis [sequence omitted]

SEQ ID NO: 6721 - DNA, 723 bp, Aquifex aeolicus
  CDS (1)..(723): transl_table=11
atgcctctaacggaacatctgagagagcttaggtatcgtttaataatatctataattgccttccttataggctccgggatagccttttactttgcaaagtacgtgtttgaaattttaaaagaacccatcctgaagtcctaccccgaagtggaattaataactctatctcccacagaacctctctttatactcataaagatatctttagcggttggatttataatcgcctctcccgtaatactttaccagttctggcgttttatagagccagccctttactcccatgaaaaaagagcttttatcccgctgcttcttggttcaatacttctctttatgcttggtgcattgtttgcctactttattgtcctgcctttagcccttaagttcttgctcggccttggatttactcagctccttgcaactccttacctttcagttgatatgtacataagctttgtccttaaacttgttgtggccttcggcatagcttttgagatgcccatagtcctttacgttctacaaaaagcaggagtaatcacccccgagcagttagcgagtttcagaaagtacttcatagttatagccttcgtgataggtgcgataatcgctccggatgtttccacacaggttttgatggctattcctcttcttctcctgtacgagatatccatcttccttggaaaactggctacgaggaagaagaaggaaattcaaaaggcataa

SEQ ID NO: 6722 - protein, 240 aa, Aquifex aeolicus
MPLTEHLRELRYRLIISIIAFLIGSGIAFYFAKYVFEILKEPILKSYPEVELITLSPTEPLFILIKISLAVGFIIASPVILYQFWRFIEPALYSHEKRAFIPLLLGSILLFMLGALFAYFIVLPLALKFLLGLGFTQLLATPYLSVDMYISFVLKLVVAFGIAFEMPIVLYVLQKAGVITPEQLASFRKYFIVIAFVIGAIIAPDVSTQVLMAIPLLLLYEISIFLGKLATRKKKEIQKA

SEQ ID NO: 6723 - DNA, 762 bp, Bacillus halodurans
  CDS (1)..(762): transl_table=11
atgaacgaacgagacatgtccttaatggaccatatcgccgagttaaggcggcggattctaatcatcgtcgtcttttttgttatcgccttggttgtcggattttttctggcaacaccgatgattacgtatttacaaggcgcgccgacggcacaagaccttccgatgaacgcattcaaattgacagatccattgcgggtctatatgacatttgcttttacgagtgcgtttattcttgtatttcccattattttatatcaattgtgggccttcgtcagtccaggtcttcatgaaaacgagcgcaaggccacattagcgtatataccgattgcatttttcctatttcttggtggactttcgtttgcctattttattttgtttccgtttctgatccaatttatcgggggattagcggaacggttacacattaacgagctttatgggatcaatgaatactttacgtttttgttccagattacgatgccgttcggtgtgctattccaactgccggtggtggttatgttcctcacgagacttggaatcgtaaccccggaatttttgcgcagtgtacggaaatatgccttttttgtcttactagtcgtcgcaggttttattacaccacctgaattaatttcccatttaatggttacggtacctctattactgctgtacgaatttagcatttgggtatcacacttaacatatcgaaaagtacaaaagctagagaaactgaggcaagaagaatatagacaggaggagggctag

SEQ ID NO: 6724 - protein, 253 aa, Bacillus halodurans
MNERDMSLMDHIAELRRRILIIVVFFVIALVVGFFLATPMITYLQGAPTAQDLPMNAFKLTDPLRVYMTFAFTSAFILVFPIILYQLWAFVSPGLHENERKATLAYIPIAFFLFLGGLSFAYFILFPFLIQFIGGLAERLHINELYGINEYFTFLFQITMPFGVLFQLPVVVMFLTRLGIVTPEFLRSVRKYAFFVLLVVAGFITPPELISHLMVTVPLLLLYEFSIWVSHLTYRKVQKLEKLRQEEYRQEEG

SEQ ID NO: 6725 - DNA, 1080 bp, Oryza sativa
  CDS (1)..(1080)
atggggagcgcgggggcgctgctctcgcactcgcctccggggctcggcggattccctcctcgccaccatcaccaccaccgtctctccgtcctccgttgcgtaccgctcctcccctccccggcgcccgagcccctcagctgtcgccacggccggcaccttcgctgcgccgccgtcgacgggggagccggccgggagacggagcgtccctcgccgcccgcacctcagagggaggagtcgccgtcgggcagcctcggcgcagccctcgaggacccatctcctcaacctgtccaaaatggatcttttggaggtatcacagaggatgaagaacagagtagcctgtacaattttctttatccgagcaaagagctacttcctgatgataaggagatgagtatatttgatcatctagaggaacttcgtgacaggatatttgtctcagtattggctgttggtgctgcgatacttggttgtttcgcttactccaaagatcttattagaattctagaagcaccagttagtgttcagggtgttcggtttctgcagctctctcctggagaatttttctttacaacattgaaggtctctggttattgtggccttctacttgggagtcctgttattctgtatgagataatagcatttgttcttccgggtttaacaagggatgaacgtaaattcctagggcccattgttctgggctcttctgtactattctaccttggcattttcttctcctacacggttcttgctcctgcagcattgaatttcttcgtgaactacgcagatggggcagtggaatcgttatggtcgattgatcagtattttgagtttgtgcttgtgcttttattcagcacaggattatcttttcaggtccctgttatccagctactgctggggcaagtcggtttggtttctagtgaccaaatgctttccatctggagatatgttgttgttggcgctgtagttgctgctgctgtgcttacaccgtcgacagatccgttgactcagatgctcttggctggtccgctgcttggcctgtacttgggtggtgcttggatggtcaagctaactggtcgataa

SEQ ID NO: 6726 - protein, 359 aa, Oryza sativa
MGSAGALLSHSPPGLGGFPPRHHHHHRLSVLRCVPLLPSPAPEPLSCRHGRHLRCAAVDGGAGRETERPSPPAPQREESPSGSLGAALEDPSPQPVQNGSFGGITEDEEQSSLYNFLYPSKELLPDDKEMSIFDHLEELRDRIFVSVLAVGAAILGCFAYSKDLIRILEAPVSVQGVRFLQLSPGEFFFTTLKVSGYCGLLLGSPVILYEIIAFVLPGLTRDERKFLGPIVLGSSVLFYLGIFFSYTVLAPAALNFFVNYADGAVESLWSIDQYFEFVLVLLFSTGLSFQVPVIQLLLGQVGLVSSDQMLSIWRYVVVGAVVAAAVLTPSTDPLTQMLLAGPLLGLYLGGAWMVKLTGR

SEQ ID NO: 6727 - DNA, 1050 bp, Oryza sativa
  CDS (1)..(1050)
atggggagcgcgggggcgctgctctcgcactcgcctccggggctcggcggattccctcctcgccaccatcaccaccaccgtctctccgtcctccgttgcgtaccgctcctcccctccccggcgcccgagcccctcagctgtcgccacggccggcaccttcgctgcgccgccgtcgacgggggagccggccgggagacggagcgtccctcgccgcccgcacctcagagggaggagtcgccgtcgggcagcctcggcgcagccctcgaggacccatctcctcaacctgaggatgaagaacagagtagcctgtacaattttctttatccgagcaaagagctacttcctgatgataaggagatgagtatatttgatcatctagaggaacttcgtgacaggatatttgtctcagtattggctgttggtgctgcgatacttggttgtttcgcttactccaaagatcttattagaattctagaagcaccagttagtgttcagggtgttcggtttctgcagctctctcctggagaatttttctttacaacattgaaggtctctggttattgtggccttctacttgggagtcctgttattctgtatgagataatagcatttgttcttccgggtttaacaagggatgaacgtaaattcctagggcccattgttctgggctcttctgtactattctaccttggcattttcttctcctacacggttcttgctcctgcagcattgaatttcttcgtgaactacgcagatggggcagtggaatcgttatggtcgattgatcagtattttgagtttgtgcttgtgcttttattcagcacaggattatcttttcaggtccctgttatccagctactgctggggcaagtcggtttggtttctagtgaccaaatgctttccatctggagatatgttgttgttggcgctgtagttgctgctgctgtgcttacaccgtcgacagatccgttgactcagatgctcttggctggtccgctgcttggcctgtacttgggtggtgcttggatggtcaagctaactggtcgataa

SEQ ID NO: 6728 - protein, 349 aa, Oryza sativa
MGSAGALLSHSPPGLGGFPPRHHHHHRLSVLRCVPLLPSPAPEPLSCRHGRHLRCAAVDGGAGRETERPSPPAPQREESPSGSLGAALEDPSPQPEDEEQSSLYNFLYPSKELLPDDKEMSIFDHLEELRDRIFVSVLAVGAAILGCFAYSKDLIRILEAPVSVQGVRFLQLSPGEFFFTTLKVSGYCGLLLGSPVILYEIIAFVLPGLTRDERKFLGPIVLGSSVLFYLGIFFSYTVLAPAALNFFVNYADGAVESLWSIDQYFEFVLVLLFSTGLSFQVPVIQLLLGQVGLVSSDQMLSIWRYVVVGAVVAAAVLTPSTDPLTQMLLAGPLLGLYLGGAWMVKLTGR

SEQ ID NO: 6729 - DNA, 1056 bp, Zea mays
  CDS (1)..(1056)
atgggaagcacaggggcgctgctttggcacccgtcgccgcaggtgcactccggtggcgtcctcttccgccagagccggcgcatcgtacgccagcgcaacttgcctctattatcgctagctgacgcggcgcttgagcccgagcgccgccgcgggcagcgcctccgctgcgctgccggcgacggggacggcgggccccgggaggctcagaaggagtctccgagcggcatcggcgcagcactcgaggatccgtctccaggacctcctgtggaaaacggttccttcagaagcccctcacaggaagaacagagtgctctgtataattttctctatccaagcaaagacttacttccagatgataaggagatgagtatatttgatcatctggaggagcttcgcgagaggattttcatctcagttttggctgttggggctgcgatactagtctgttttgctttttcaaaagatctggttctttttctagaggcaccagtgactgttcagggtgttcggtttttgcagctctcgcctggggaatttttctttacaacattaaaggtttcaggttattgtggccttttacttggaagtcctatcattttatatgagatcattgcatttgttatcccaggtttaacaagggatgaacggaaatttctcgggcctattgtgttgggttcttctgttctattctacctaggcattttcttctcctacacggttctcagccctgctgcgttgaacttctttgtgaattatgcagatggggcagtggaatcgttgtggtcaatagaccagtacttcgaattcatacttgtgctgatgtttagcacagggttgtcctttcaggtccctgttatccagcttctgctaggacaacttggattggtttctagtgaccaaatgctttcgatctggagatatgttgttgttggcgctgtcgtcgctgctgctgtgcttacaccttcaacagatccgttgacacaaatgttgttggctggtcctttgcttggtttgtacttgggtggcgcatggatggtcaagctaactgggcgataa

SEQ ID NO: 6730 - protein, 351 aa, Zea mays
MGSTGALLWHPSPQVHSGGVLFRQSRRIVRQRNLPLLSLADAALEPERRRGQRLRCAAGDGDGGPREAQKESPSGIGAALEDPSPGPPVENGSFRSPSQEEQSALYNFLYPSKDLLPDDKEMSIFDHLEELRERIFISVLAVGAAILVCFAFSKDLVLFLEAPVTVQGVRFLQLSPGEFFFTTLKVSGYCGLLLGSPIILYEIIAFVIPGLTRDERKFLGPIVLGSSVLFYLGIFFSYTVLSPAALNFFVNYADGAVESLWSIDQYFEFILVLMFSTGLSFQVPVIQLLLGQLGLVSSDQMLSIWRYVVVGAVVAAAVLTPSTDPLTQMLLAGPLLGLYLGGAWMVKLTGR

SEQ ID NO: 6731 - DNA, 1056 bp, Zea mays
  CDS (1)..(1056)
atgggaagcacaggggcgctgctttggcacccgtcgccgcaggtgcactccggtggcgtcctcttccgccagagccggcgcatcgtacgccagcgcaacttgcctctattatcgctagctgacgcggcgcttgagcccgagcgccgccgcgggcagcgcctccgctgcgctgccggcgacggggacggcgggccccgggaggctcagaaggagtctccgagcggcatcggcgcagcactcgaggatccgtctccaggacctcctgtggaaaacggttccttcagaagcccctcacaggaagaacagagtgctctgtataattttctctatccaagcaaagacttacttccagatgataaggagatgagtatatttgatcatctggaggagcttcgcgagaggattttcatctcagttttggctgttggggctgcgatactaggctgttttgctttttcaaaagatctggttctttttctagaggcaccagtgactgttcagggtgttcggtttttgcagctctcgcctggggaatttttctttacaacattaaaggtttcaggttattgtggccttttacttggaagtcctatcattttatatgagatcattgcatttgttatcccaggtttaacaagggatgagcggaaatttctcgggcctattgtgttgggttcttctgttctattctacctaggcattttcttctcctacacggttctcagccctgctgcgttgaacttctttgtgaattatgcagatggggcagtggaatcgttgtggtcaatagaccagtacttcgaattcatacttgtgctgatgtttagcacagggttgtcctttcaggtccctgttatccagcttctgctaggacaacttggattggtttctagtgaccaaatgctttcgatctggagatatgttgttgttggcgctgtcgtcgctgctgctgtgcttacaccttcaacagatccgttgacacaaatgttgttggctggtcctttgcttggtttgtacttgggtggcgcatggatggtcaagctaactgggcgataa

SEQ ID NO: 6732 - protein, 351 aa, Zea mays
MGSTGALLWHPSPQVHSGGVLFRQSRRIVRQRNLPLLSLADAALEPERRRGQRLRCAAGDGDGGPREAQKESPSGIGAALEDPSPGPPVENGSFRSPSQEEQSALYNFLYPSKDLLPDDKEMSIFDHLEELRERIFISVLAVGAAILGCFAFSKDLVLFLEAPVTVQGVRFLQLSPGEFFFTTLKVSGYCGLLLGSPIILYEIIAFVIPGLTRDERKFLGPIVLGSSVLFYLGIFFSYTVLSPAALNFFVNYADGAVESLWSIDQYFEFILVLMFSTGLSFQVPVIQLLLGQLGLVSSDQMLSIWRYVVVGAVVAAAVLTPSTDPLTQMLLAGPLLGLYLGGAWMVKLTGR

SEQ ID NO: 6733 - DNA, 1071 bp, Zea mays
  CDS (1)..(1071)
atgggaagcgctggggcgctgctctggcacacgccgcagcagctgcacggccgtggcatcctcttccgccagagccggcctctcctgcgccagcgcaacctgcctctaatatcgctagctgccccggcgctcgagcccgagcgccgccgccggcagtgcctccgctgcgctgccgtcgacggggacggcgccctccgggagtctgggccactgccacagaaggagtctccgtccagcggcatcggtgccgcactcgaggacccgcctccaggacctcctgtggagaatggttcctttggaggcccctcacaggaagaacagagtgctctatatacttttctttatccaagcaaagacttacttccagatgataaggagatgagtatatttgatcatctagaggagcttcgtgacaggattttcatctcagttttggctgttggggctgcgatattaggctgttttgctttttcaaaagatttggttatttttcttgaggcaccagtgactgctcagggtgttcggtttttgcagctctcgcctggggaatttttctttacaacattaaaggtttcaggttattgtggccttttacttggaagtcctatcattttgtatgagatcattgcatttgttatcccaggtttaacaagggacgagcggaaatttcttgggcctattgtgttgggttcttctgttctattctatctaggcattttcttctcctacacggttctcagccctgctgcgttgaacttctttgtgaattatgcagatggggcagtggaatcgttgtggtcaatagaccagtactttgaattcatacttgtgctgatgtttagcacagggttgtcctttcaggtccctgttatccagcttttgctgggacaacttggattggtttctagtgaccaaatgctttcgatctggagatatgttgttgttggtgctgttgttgctgctgctgtgcttacaccttcgacggacccgttgacacaaatgctcctggctggtcccttgcttggtttatacttgggtggtgcatggatggtcaagataactgggcgctaa

SEQ ID NO: 6734 - protein, 356 aa, Zea mays
MGSAGALLWHTPQQLHGRGILFRQSRPLLRQRNLPLISLAAPALEPERRRRQCLRCAAVDGDGALRESGPLPQKESPSSGIGAALEDPPPGPPVENGSFGGPSQEEQSALYTFLYPSKDLLPDDKEMSIFDHLEELRDRIFISVLAVGAAILGCFAFSKDLVIFLEAPVTAQGVRFLQLSPGEFFFTTLKVSGYCGLLLGSPIILYEIIAFVIPGLTRDERKFLGPIVLGSSVLFYLGIFFSYTVLSPAALNFFVNYADGAVESLWSIDQYFEFILVLMFSTGLSFQVPVIQLLLGQLGLVSSDQMLSIWRYVVVGAVVAAAVLTPSTDPLTQMLLAGPLLGLYLGGAWMVKITGR

SEQ ID NO: 6735 - DNA, 22 bp, Artificial sequence
  primer
atgaaggaagcccccctggtag

SEQ ID NO: 6736 - DNA, 24 bp, Artificial sequence
  primer
ttaagcggcctcctggggcctctg

SEQ ID NO: 6737 - protein, 281 aa, Artificial sequence
  consensus sequence
  Variant (3)..(3): Xaa in position 3 is any amino acid
  Variant (7)..(7): Xaa in position 7 is any amino acid
  Variant (9)..(50): Xaa in position 9 to 50 is any amino acid
  Variant (51)..(89): Xaa in position 51 to 89 is any or no amino acid
  Variant (91)..(94): Xaa in position 91 to 94 is any amino acid
  Variant (96)..(106): Xaa in position 96 to 106 is any amino acid
  Variant (108)..(111): Xaa in position 108 to 111 is any amino acid
  Variant (113)..(115): Xaa in position 113 to 115 is any amino acid
  Variant (117)..(118): Xaa in position 117 to 118 is any amino acid
  Variant (122)..(124): Xaa in position 122 to 124 is any amino acid
  Variant (126)..(138): Xaa in position 126 to 138 is any amino acid
  Variant (139)..(141): Xaa in position 139 to 141 is any or no amino acid
  Variant (144)..(145): Xaa in position 144 to 145 is any amino acid
  Variant (147)..(150): Xaa in position 147 to 150 is any amino acid
  Variant (152)..(155): Xaa in position 152 to 155 is any amino acid
  Variant (157)..(160): Xaa in position 157 to 160 is any amino acid
  Variant (162)..(177): Xaa in position 162 to 177 is any amino acid
  Variant (178)..(207): Xaa in position 178 to 207 is any or no amino acid
  Variant (209)..(219): Xaa in position 209 to 219 is any amino acid
  Variant (221)..(222): Xaa in position 221 to 222 is any amino acid
  Variant (224)..(225): Xaa in position 224 to 225 is any amino acid
  Variant (227)..(231): Xaa in position 227 to 231 is any amino acid
  Variant (233)..(235): Xaa in position 233 to 235 is any amino acid
  Variant (237)..(261): Xaa in position 237 to 261 is any amino acid
  Variant (264)..(264): Xaa in position 264 is any amino acid
  Variant (265)..(266): Xaa in position 265 to 266 is any or no amino acid
  Variant (268)..(274): Xaa in position 268 to 274 is any amino acid
  Variant (276)..(280): Xaa in position 276 to 280 is any amino acid
HLXELRXRXXXXXXXXXXXXXXXXXXXXXXXXXXXXXXXXXXXXXXXXXXXXXXXXXXXXXXXXXXXXXXXXXXXXXXXXXXXXXXXXXFXXXXKXXXXXXXXXXXPXXXXQXXXFXXPGLXXXEXXXXXXXXXXXXXXXXLFXXGXXXXYXXXXPXXXXFXXXXXXXXXXXXXXXXXXXXXXXXXXXXXXXXXXXXXXXXXXXXXXYXXXXXXXXXXXGXXFXXPXXXXXLXXXGXXXXXXXXXXXXXXXXXXXXXXXXXTPXXXDXXXXXXXAXXXXXL

SEQ ID NO: 6738 - protein, 9 aa, Artificial sequence
  protein pattern
  Variant (3)..(3): Xaa in position 3 is any amino acid
  Variant (7)..(7): Xaa in position 7 is any amino acid
  Variant (9)..(9): Xaa in position 9 is Ile, Leu or Val
HLXELRXRX

SEQ ID NO: 6739 - DNA, 1131 bp, Thermus thermophilus
  CDS (1)..(1131): transl_table=11
atgcgggagtggaagattattgactccaccttacgggaaggggaacagtttgaaaaggcgaacttctccacccaggacaaggtggagatcgccaaggccctggacgagttcggcattgagtacattgaggtcaccaccccggtggcctccccccagtcccgcaaggacgccgaggtcctcgcctccttgggcctcaaggccaaggtggtgacccacatccagtgccgcctggacgcggccaaggtggcggtggagacgggagtccaggggattgacctcctcttcggcacgagcaagtacctccgggccgcccatgggcgggacatccccaggatcattgaggaggccaaagaggtgatcgcctacatccgcgaggcggccccccacgtggaggtgcgcttctccgccgaggacaccttccgctccgaggagcaggacctcctcgccgtctacgaggccgtcgccccctacgtggaccgggtgggcctggcggacaccgtgggcgtggccacgccccggcaggtctacgccctggtgcgggaggtgcggcgggtggtggggcccagggtggacattgagttccacggccacaacgacaccgggtgcgccatcgccaacgcgtatgaggccattgaggccggggccacccacgtggacaccaccatcctggggatcggggagaggaacgggatcacgcctttgggggggttcctcgcccgcatgtacaccctccagcccgagtacgtgcgcaggaagtacaagctggagatgctccccgagctggaccggatggtggcccggatggtgggggtggagatccccttcaacaactacatcaccggggagacggccttcagccacaaggcggggatgcacctcaaggccatctacatcaaccccgaggcctacgagccctaccccccggaggtcttcggggtgaagcggaagctcatcatcgcctcgaggctcaccgggcggcacgccatcaaggcgcgggcggaggagctcggcctccactacggggaggaggagctccaccgggtcacccagcacatcaaggccctggccgaccggggccagctcaccctggaggagctggaccggatcctccgggagtggatcacggcgtaa

SEQ ID NO: 6740 - protein, 376 aa, Thermus thermophilus
MREWKIIDSTLREGEQFEKANFSTQDKVEIAKALDEFGIEYIEVTTPVASPQSRKDAEVLASLGLKAKVVTHIQCRLDAAKVAVETGVQGIDLLFGTSKYLRAAHGRDIPRIIEEAKEVIAYIREAAPHVEVRFSAEDTFRSEEQDLLAVYEAVAPYVDRVGLADTVGVATPRQVYALVREVRRVVGPRVDIEFHGHNDTGCAIANAYEAIEAGATHVDTTILGIGERNGITPLGGFLARMYTLQPEYVRRKYKLEMLPELDRMVARMVGVEIPFNNYITGETAFSHKAGMHLKAIYINPEAYEPYPPEVFGVKRKLIIASRLTGRHAIKARAEELGLHYGEEELHRVTQHIKALADRGQLTLEELDRILREWITA

SEQ ID NO: 6741 - DNA, 2047 bp, Oryza sativa
  CDS (243)..(1712)
aagttcagactcaccaagagcgtccggcaattcggccgtgcgacgaacttcttgctgccgcgactgcgacctgacctcgacctctcttgttcgagtcacatcacacactcatccaattgaacagtcatcttcacccttggctgtcccatttattgtcttctacacttctcctctacagccttgcttctacgttatacccagaccctcttctccaaggcgcagcgacacatacacacgcgaccatgtgccctcaaccagacgagccacaggccctcggtgccaatggcgtgcaccaaaacggcaacggcaccaccaacggtgatcacgaaggctaccgcgccttcaagaccgaccagagcaagaaggtccagagcagcaacccttacgctcctgtaggagacttcctctcaaacgtctccaagtttaagatcattgagtccactctccgcgagggcgagcagttcgccaacgccttcttcgacaccgagaccaagattcgcatcgctaaggccctggacgacttcggcgtcgactacatcgaactcacctctcccgctgccagtgagcagtcccgcctcgactgcgaggccatctgcaacctcggtctcaaggccaagatcctcactcacgtgagatgtaacatgcaggacgccaagctggccgtcgcgactggtgtggacggtgtggatgtggttatcggcaccagcagccaccttatggagcacagccacggcaaggacatcacatacatcaagaacaccgccatcgaggtcatcgagtacgtcaagtcacaaggcaaggagatccgtttctcctccgaggattcgttccgcagtgaccttgtcgatctcctcaccatctacagcgccgtcgacaaggtcggtgtgcacagagtcggtattgctgacaccgtcggctgtgcaactcccagacaagtctacgacctcgtccgcactcttcgcggcgttgtcagctgcgacatcgagactcacttccacaacgacactggctgcgccattgccaacgcctactgcgccctcgaggccggtgccacccacatcgacacctctgttatcggcattggtgagcgcaacggtatcacccctcttggtggcctgatggcccgcatgatcgtcgccgaccgcgactacgtcaagtccaagtacaagcttgagaagctgaaggagatcgaggacatcgtcgccgaggccgtcgagatcaacattcccttcaacaactacatcaccggtttctgcgccttcacccacaaggctggtatccacgccaaggccatcttgaacaacccttccacctacgagatcatcgacccgaaggactttggcatgagccgttacgtccacttcgcttcgcgtctcactggctggaacgccatcaagtcgcgtgctgagcagctcggcctcgacatgaccgacgcgcagatcaagaccgtgactctcaagatcaaggccatggccgatgttcgtcctctcgccatcgatgacgccgacagcattatccgcacttaccactacaacctcaacgctacccaggagaagcctctcctccagcttactgaggaggagaaggagaagttcgccaaggccgagcgtgagcttgctcaggaggacgagaagaaggcgctcgagcgcaaggccgacgacgaggccgatgtgccccgtgccaagaagcagaagaccgagactgtcgcatagatgtctgcgattgacgagatctgaggagtctgctcttacgagtgaacgtgtaaaagaaggagcagaagaagcaggaggaggaggatgacgagaagaatgtgtgctacaagtctctttttatactggcggaagagcatcgaaaaggtttcggctcctccgcccatctgggcattttcatgtatttgaagacggcgctgggattacgaaaaaaatcgggcgctgtacctttgtttgttttgctgtaccttttatatcacctagctttggttgcgagagcgaaatggcgaccacctttgaaataggcaggaagcaatgcaaaaagaacgatctacttg

SEQ ID NO: 6742 - protein, 489 aa, Oryza sativa
MCPQPDEPQALGANGVHQNGNGTTNGDHEGYRAFKTDQSKKVQSSNPYAPVGDFLSNVSKFKIIESTLREGEQFANAFFDTETKIRIAKALDDFGVDYIELTSPAASEQSRLDCEAICNLGLKAKILTHVRCNMQDAKLAVATGVDGVDVVIGTSSHLMEHSHGKDITYIKNTAIEVIEYVKSQGKEIRFSSEDSFRSDLVDLLTIYSAVDKVGVHRVGIADTVGCATPRQVYDLVRTLRGVVSCDIETHFHNDTGCAIANAYCALEAGATHIDTSVIGIGERNGITPLGGLMARMIVADRDYVKSKYKLEKLKEIEDIVAEAVEINIPFNNYITGFCAFTHKAGIHAKAILNNPSTYEIIDPKDFGMSRYVHFASRLTGWNAIKSRAEQLGLDMTDAQIKTVTLKIKAMADVRPLAIDDADSIIRTYHYNLNATQEKPLLQLTEEEKEKFAKAERELAQEDEKKALERKADDEADVPRAKKQKTETVA

SEQ ID NO: 6743 - DNA, 1392 bp, Aspergillus fumigatus
  CDS (1)..(1392)
atgtgtcctggtgcagacaatgagcccaatgggcacaccaacggcgccaatggcaccgttcctcaccccggcttcactgccgtcgagacccgtcaaaaccctcacccttcggcttctcgtaacccttacggccacaacgtcggtgtgaccgacttcttgagcaatgtctctcgttttaagatcattgagagtacccttcgtgaaggtgaacagtttgccaacgccttcttcgatacggagaagaagattgagattgccaaagctctggatgactttggtgtcgactacattgagctcaccagcccctgtgcttccgagcagtcgagaaaggattgtgaggctatctgcaagcttggcttgaaggccaagatcctcacacacatcagatgtcacatggacgacgccagagttgctgtcgagactggtgttgacggagttgacgtcgttattgggacctcgtcctatctccgggagcactctcacggcaaggacatgacctacatcaagaacaccgccattgaagtcatcgaattcgtcaagtccaagggcattgaaatccggttctccagcgaggactccttccgttctgacctcgttgacctgctgtccatttactccgctgtcgacaaggtcggcgttaatcgtgttggtattgctgacactgtcggctgcgcttcgcctcgtcaggtttacgaactcgtccgtgtgttgagaggtgtcgttagctgtgatattgaaactcacttccacaatgacaccgggtgtgccatcgctaacgcttactgcgccctggaggctggtgccactcacatcgatacctctgtccttggtatcggggagcgtaacggcatcactccccttggtggtctcatggcccgtatgatggtcgccgaccctgaatacgtcaagagcaagtacaagctcgagaagctcaaggacattgaggatcttgttgccgctgccgttgaagtcaacattcccttcaacaactacatcactggtttctgcgccttcacccacaaagccggtatccacgccaaggccatcctcaacaaccccagcacatacgagattatcaaccctgccgattttggtatgaccagatacgttcactttgcttcgcgcttgacgggttggaacgctatcaagtctcgtgctcagcagctcaacattgagatgaccgatgctcagtacaaggagtgcactgccaaaatcaaggctcttgctgatatccgtcccattgccgttgacgacgctgacagcattatccgtgcctactaccgcaacctcaagtcaggcgagaacaagcctctccttgacctcacagctgaagagcaagctcaatttgctgccaaggagaaggagcttgctggctcgggtgttattgcttaa

SEQ ID NO: 6744 - protein, 463 aa, Aspergillus fumigatus
MCPGADNEPNGHTNGANGTVPHPGFTAVETRQNPHPSASRNPYGHNVGVTDFLSNVSRFKIIESTLREGEQFANAFFDTEKKIEIAKALDDFGVDYIELTSPCASEQSRKDCEAICKLGLKAKILTHIRCHMDDARVAVETGVDGVDVVIGTSSYLREHSHGKDMTYIKNTAIEVIEFVKSKGIEIRFSSEDSFRSDLVDLLSIYSAVDKVGVNRVGIADTVGCASPRQVYELVRVLRGVVSCDIETHFHNDTGCAIANAYCALEAGATHIDTSVLGIGERNGITPLGGLMARMMVADPEYVKSKYKLEKLKDIEDLVAAAVEVNIPFNNYITGFCAFTHKAGIHAKAILNNPSTYEIINPADFGMTRYVHFASRLTGWNAIKSRAQQLNIEMTDAQYKECTAKIKALADIRPIAVDDADSIIRAYYRNLKSGENKPLLDLTAEEQAQFAAKEKELAGSGVIA

SEQ ID NO: 6745 - DNA, 1920 bp, Oryza sativa (japonica cultivar-group)
  CDS (1)..(1920)
atggcctcctccctcctctcctccccaaaaccctcctccttctcctccgcaaaccccacctccactccacgcccacgcgcccaaactctctcccccttccgcgccgccgccccacgcttctcccatggcctcgccaccgccgccgccgccgcaaaccctagcgcctcccgccgctgctaccaccgcgccttcgcccgccccgtccgggcgtccatggcgcagccgcggcgcccggagtacgtccccaaccgcatcgacgaccccaactacgtccgcatcttcgacaccaccctccgcgacggggagcagtcccccggggccaccatgaccagcgccgagaagctcgtcgtcgcgcgccagctcgcccgcctcggcgtcgacatcatcgaggccgggttcccggcctcctcccccgacgacctcgacgccgtgcgctccatcgccatcgaggtcgggaacacgcccgtcggggaggacggccacgtgccggtcatctgtggcctctcgagatgcaataagcgagacattgatgctgcctgggaggccgtgcggcacgcgcggcggccgcgcatccacaccttcattgccaccagcgagatccatatgcagcacaagctaaggaagacgcccgagcaggtggtggccattgccaaggaaatggtggcctacgcccgcagcctaggctgccctgatgtcgagttcagccctgaagacgctggcaggtcaaacagagagtttctatatcatattctagaggaagtcataaaagctggagcaacaacactcaatatcccagacactgttggatacactcttccttatgaatttgggaagctaattgctgatataaaagcaaacactccaggaattgaaaatgctattatttctactcattgccagaatgaccttggtctagcaaccgccaatacattagcgggcgctcatgcaggagcacggcaattagaggtgactatcaacggtattggtgaaagggctggaaatgcttctttggaagaggttgtgatggcaattaaatgtcgccgagagctcttaggaggtctgtatactggaatcaatacccaacatatcactatgtcaagcaaaatggtacaagagcacagtggacttcatgtacaaccacataaagctattgtcggtgccaatgcctttgcacatgaaagtggaattcatcaggatgggatgcttaaatacaaaggaacttatgaaataatttctcctgatgatattggtctaacacgtgcaaacgagtttggtattgttcttgggaaactcaggttaaaccttgctcacttgacattgaggaaacctctacctggcctgcttggatatgaaatcactgacaaggaatttgaggatttctttaaacgctacaaagaggttgcagagaagaaaaagcgtgtaactgatgaagacattgaggcgctgttgtctgatgagatatttcagcccaaggttttttggtcccttgctgatgtacaggcaacttgtggaacacttggtctgtctacagcaactgtcaaactgataggtccggatggagaggagaagattgcatgtgcagttggaacaggtccagttgatgcagcttacaaggctgttgatgatataatacagatcccaactgttcttcgagaatatagcatgacatcggtcacagaaggcattgatgcaattgcaactactagagtggttgtcactggagatgttagcgactctaaacatgctttgactggtcactccttcagccgggcattcagtgggagtggtgccgcactggatattgttgtttccagtgtgcgagcttacctgagtgccctgaacaagatgtccagttttgttggggctatcaaggctagtagtgaagtatctgaaagccaaagagttcaaaccacagaatga

SEQ ID NO: 6746 - protein, 639 aa, Oryza sativa (japonica cultivar-group)
MASSLLSSPKPSSFSSANPTSTPRPRAQTLSPFRAAAPRFSHGLATAAAAANPSASRRCYHRAFARPVRASMAQPRRPEYVPNRIDDPNYVRIFDTTLRDGEQSPGATMTSAEKLVVARQLARLGVDIIEAGFPASSPDDLDAVRSIAIEVGNTPVGEDGHVPVICGLSRCNKRDIDAAWEAVRHARRPRIHTFIATSEIHMQHKLRKTPEQVVAIAKEMVAYARSLGCPDVEFSPEDAGRSNREFLYHILEEVIKAGATTLNIPDTVGYTLPYEFGKLIADIKANTPGIENAIISTHCQNDLGLATANTLAGAHAGARQLEVTINGIGERAGNASLEEVVMAIKCRRELLGGLYTGINTQHITMSSKMVQEHSGLHVQPHKAIVGANAFAHESGIHQDGMLKYKGTYEIISPDDIGLTRANEFGIVLGKLRLNLAHLTLRKPLPGLLGYEITDKEFEDFFKRYKEVAEKKKRVTDEDIEALLSDEIFQPKVFWSLADVQATCGTLGLSTATVKLIGPDGEEKIACAVGTGPVDAAYKAVDDIIQIPTVLREYSMTSVTEGIDAIATTRVVVTGDVSDSKHALTGHSFSRAFSGSGAALDIVVSSVRAYLSALNKMSSFVGAIKASSEVSESQRVQTTE

SEQ ID NO: 6747 - DNA, 1896 bp, Arabidopsis thaliana
  CDS (1)..(1896)
atggcgtcttcgcttctgagaaaccctaatctctactcatcaacaacaatcaccaccacttcttttcttcccaccttctcctctaaacccacacctatctcctcctctttccgtttccaaccatctcaccaccgttcaatctccctccgaagtcaaaccctccgtctctcatgctcaatctcagatccttctccactaccacctcacactcctcgccgtccccgtcctgaatacatccccaaccgcatttccgatccaaactacgtccgcgtcttcgatactactctccgtgacggtgaacaatctccaggagctacacttacttccaaggaaaaacttgacatcgctcgtcagctagctaaacttggtgttgacatcatcgaggctgggtttcctgctgcttccaaggatgattttgaagcggttaagactatagctgaaacagttggaaacactgttgatgagaatggttatgttcctgttatctgtggactctctagatgcaataagaaggatattgagagagcttgggatgctgtgaaatacgctaaacggcctaggattcatacttttatagctactagtgatatacatttggagtataaactaaagaaaaccaaagcagaggtcatcgaaatcgctaggagtatggttagattcgcgaggagcttggggtgcgaagatgttgagttcagtccagaagatgcaggaagatcggagagagagtacttatacgagattcttggtgaagtgataaaagcaggagcaacaactctcaacatacctgatactgttggtataactttgcctagtgagtttggtcaactgattactgatttaaaggccaatactccggggattgaaaatgttgtcatctcaacacattgtcagaatgatcttggactctctacggccaacactttatctggggcacatgcaggtgcgaggcagatggaagtgacgatcaatggaattggtgaaagagctggaaacgcttcactggaagaggttgtgatggccataaaatgccgtggagatcatgtattaggaggtctatttaccggaattgatactcggcacattgttatgacaagcaagatggtagaggagtacactgggatgcagacacaacctcataaggctattgtaggagcgaatgcctttgcgcatgaaagtggaattcaccaggatggaatgctgaaacacaagggtacatatgaaattatatgtcccgaagaaattggacttgaacgatcaaatgatgctggcattgtcttggggaagcttagtgggcgtcatgcgctgaaagaccgtttgactgagcttggttatcaattagatgatgaacagctaagtaccattttctggcgcttcaaaaccgtggctgagcagaaaaagagagttactgatgcggacataatagctttagtatctgatgaagttttccagccagaagccgtgtggaaactcctggacattcagataacttgtggaactctcgggctttcaacagcaactgtaaaacttgctgacgctgatggcaaagaacatgtcgcttgttctattggaactgggcctgtggattcagcttacaaggcagtagatcttatcgtaaaggaaccggctactctgcttgagtactcaatgaatgcagtaacagaaggcattgatgccatcgcaaccacaagagttcttatccgtggaagcaacaaatactcatctacaaacgcaataactggtgaagaggttcaaagaacctttagtggaactggagcaggaatggatattgtggtgtcaagcgtcaaagcttatgttggagctttgaacaaaatgatggacttcaaagaaaactccgccacaaaaatcccttcccaaaaaaacagagtcgctgcctga

SEQ ID NO: 6748 - protein, 631 aa, Arabidopsis thaliana
MASSLLRNPNLYSSTTITTTSFLPTFSSKPTPISSSFRFQPSHHRSISLRSQTLRLSCSISDPSPLPPHTPRRPRPEYIPNRISDPNYVRVFDTTLRDGEQSPGATLTSKEKLDIARQLAKLGVDIIEAGFPAASKDDFEAVKTIAETVGNTVDENGYVPVICGLSRCNKKDIERAWDAVKYAKRPRIHTFIATSDIHLEYKLKKTKAEVIEIARSMVRFARSLGCEDVEFSPEDAGRSEREYLYEILGEVIKAGATTLNIPDTVGITLPSEFGQLITDLKANTPGIENVVISTHCQNDLGLSTANTLSGAHAGARQMEVTINGIGERAGNASLEEVVMAIKCRGDHVLGGLFTGIDTRHIVMTSKMVEEYTGMQTQPHKAIVGANAFAHESGIHQDGMLKHKGTYEIICPEEIGLERSNDAGIVLGKLSGRHALKDRLTELGYQLDDEQLSTIFWRFKTVAEQKKRVTDADIIALVSDEVFQPEAVWKLLDIQITCGTLGLSTATVKLADADGKEHVACSIGTGPVDSAYKAVDLIVKEPATLLEYSMNAVTEGIDAIATTRVLIRGSNKYSSTNAITGEEVQRTFSGTGAGMDIVVSSVKAYVGALNKMMDFKENSATKIPSQKNRVAA

SEQ ID NO: 6749 - DNA, 1896 bp, Arabidopsis thaliana
  CDS (1)..(1896)
atggagtcttcgattctcaaaagccctaatctctcttcaccatcgttcggtgtaccttcaattcccgccttatcctcctcctccacctcaccattttcatctcttcatctccgatcacagaaccaccgtaccatctctcttaccaccgccggaaaattccgtgtctcgtattctctctccgcttcttcacctctaccacctcatgctcctcgccgtcgtcccaattacatccctaaccgtatatccgatcccaattacgtcagaatcttcgatacaactctccgagacggtgaacagtctcccggagctacactaacctccaaggaaaagctcgatatcgctcgtcaattagccaagctcggagtcgacatcatcgaagctggatttcccgctgcttcaaaagacgatttcgaagctgttaaaaccatagctgagactgttggcaataccgtcgacgaaaatggctatgtccctgtaatctgtggtctctcgagatgtaacaagaaggatattgagacggcttgggaagctgtgaagtacgctaagcggccaagaatccatacgtttattgccactagtgatattcatctgaagtataagttgaagaagagtaaagaagaagttattgagatcgctaggaacatggttagattcgccagaagcttgggatgtgaagatgttgaatttagtccagaagatgccggaagatcggagagagagtacttatacgagattcttggtgaagtgatcaaagctggagcaaccactcttaacatacctgacactgttggtataaccttgcctagtgagtttggtcagttgattgctgatattaaagctaatactcctgggatccaaaatgttataatctctacacattgtcagaatgatcttggactctccaccgccaacactttatctggtgcacattcgggcgcgaggcaagtggaagtgactatcaatggaattggcgaaagagctggaaacgcttcattggaagaggttgtcatggccataaaatgccgtggagatcatgtcttaggaggcctatttactggaatcgatacccggcacattgttatgacaagcaagatggttgaggagtacactggtatgcaaacgcagccccataaggctattgtaggagcaaacgcctttgcgcatgaaagtggtattcatcaggatggaatgctgaagcacaagggtacctatgaaattatgtcccccgaagagattgggcttgagcgatcaaatgatgctggcatcgtgctgggaaagcttagtgggcgtcacgcactgaaagaccgtttaaatgagctcggttatgtcctggatgatgggcagctaagcaaccttttctggcgtttcaaagctgtggcagagcaaaaaaagagagttaccgatgctgacttaatagctttagtatctgatgaagtgtttcagccagaggctgtctggaaactcctggacatgcagataacttgtggaactctcggtctctcaacatctactgtaaaacttgctgactccgatggcaaagagcatgtagcttgttctgttggaaccggacctgtagatgcagcttacaaggcagttgatcttatcgttaaggaacctgcgactctgcttgagtactcgatgaatgcagtaacagaaggcattgatgctattgcaaccacacgggttctaatccgcggagacaacaactactcatcaacaaacgcggtaacgggtgaatctgttgaaagaacttttagtggaaccggagcaggaatggacattgttgtgtcgagcgttaaagcttatgttggagctttgaacaaaatgttgggtttcaaagaacacacctccactttaagtaaaacccctttggagaccaacgaagtccctgcctga

SEQ ID NO: 6750 - protein, 631 aa, Arabidopsis thaliana
MESSILKSPNLSSPSFGVPSIPALSSSSTSPFSSLHLRSQNHRTISLTTAGKFRVSYSLSASSPLPPHAPRRRPNYIPNRISDPNYVRIFDTTLRDGEQSPGATLTSKEKLDIARQLAKLGVDIIEAGFPAASKDDFEAVKTIAETVGNTVDENGYVPVICGLSRCNKKDIETAWEAVKYAKRPRIHTFIATSDIHLKYKLKKSKEEVIEIARNMVRFARSLGCEDVEFSPEDAGRSEREYLYEILGEVIKAGATTLNIPDTVGITLPSEFGQLIADIKANTPGIQNVIISTHCQNDLGLSTANTLSGAHSGARQVEVTINGIGERAGNASLEEVVMAIKCRGDHVLGGLFTGIDTRHIVMTSKMVEEYTGMQTQPHKAIVGANAFAHESGIHQDGMLKHKGTYEIMSPEEIGLERSNDAGIVLGKLSGRHALKDRLNELGYVLDDGQLSNLFWRFKAVAEQKKRVTDADLIALVSDEVFQPEAVWKLLDMQITCGTLGLSTSTVKLADSDGKEHVACSVGTGPVDAAYKAVDLIVKEPATLLEYSMNAVTEGIDAIATTRVLIRGDNNYSSTNAVTGESVERTFSGTGAGMDIVVSSVKAYVGALNKMLGFKEHTSTLSKTPLETNEVPA

SEQ ID NO: 6751 - DNA, 1521 bp, Arabidopsis thaliana
  CDS (1)..(1521)
atggcttcatcgcttctgacatcttccgttatgatccctaccaccggttccaccgtggttggccggtcagtgttaccctttcaatcttccctgcactctctccgcctgacccattcgtacaagaaccccgcattgttcatctcatgttgctcttctgtgtccaaaaatgcggcaactagttctactgatctcaaacccgttgtggaacggtggccggagtacataccgaacaagcttcccgacggaaactatgtgcgtgtattcgacacgacgctccgtgacggtgaacaatctcctggtggatccctcactccgccgcagaagctagagattgcccgacagctcgctaaactccgagtagacatcatggaagtcggttttccgggatcatctgaagaagagttagaaaccattaagaccatcgccaagactgtggggaatgaggtggatgaggaaacaggttacgtccctgtgatatgcgccatagctcgatgcaaacatagagacattgaggcgacttgggaggcgctgaagtacgcgaagaggccaaggatactcgtattcacatctactagtgacattcacatgaaatataagttgaaaaagactcaagaagaagtgattgagatggccgtgagtagtattaggtttgctaaaagcttgggcttcaatgacatccagtttgggtgcgaagatggcggcaggtcggacaaggatttcctatgcaagattctaggagaagccataaaagccggtgttacggtggtgaccatcggtgatacggtagggatcaacatgccacatgaatacggggaactcgtgacttatctcaaagcaaacacccctggaattgacgatgttgtcgtcgctgttcattgtcacaacgaccttggtcttgcaaccgccaactcaatcgccggtatacgtgcgggagcaagacaggtcgaagtaactatcaacggaattggtgaaagaagtggcaatgcgtcgcttgaggaggtcgtgatggctttgaaatgtcgaggggcatatgtgatcaatggggtttacacaaaaatagacacacgccaaatcatggctaccagcaagatggttcaagagtacacgggcttgtatgttcaagcacataagcccatagttggagcgaactgttttgttcatgagagcggcattcatcaggatggaatattgaaaaataggagtacttatgagatcttatcaccagaagatattgggattgtaaaatctcaaaattccggccttgttcttggaaagcttagtggacgtcacgctgtgaaagatcggctgaaagagttgggatatgaactcgatgatgagaaattgaacgctgtcttctcactattcagagatttaaccaagaataaaaagagaatcacggatgctgatttgaaggcattagtaacatctagcgatgaaatctctttggagaaattaaacggcgctaacggtttaaagtctaacggctatataccagttcctcaggtttcatcgaatgtgtaa

SEQ ID NO: 6752 - protein, 506 aa, Arabidopsis thaliana
MASSLLTSSVMIPTTGSTVVGRSVLPFQSSLHSLRLTHSYKNPALFISCCSSVSKNAATSSTDLKPVVERWPEYIPNKLPDGNYVRVFDTTLRDGEQSPGGSLTPPQKLEIARQLAKLRVDIMEVGFPGSSEEELETIKTIAKTVGNEVDEETGYVPVICAIARCKHRDIEATWEALKYAKRPRILVFTSTSDIHMKYKLKKTQEEVIEMAVSSIRFAKSLGFNDIQFGCEDGGRSDKDFLCKILGEAIKAGVTVVTIGDTVGINMPHEYGELVTYLKANTPGIDDVVVAVHCHNDLGLATANSIAGIRAGARQVEVTINGIGERSGNASLEEVVMALKCRGAYVINGVYTKIDTRQIMATSKMVQEYTGLYVQAHKPIVGANCFVHESGIHQDGILKNRSTYEILSPEDIGIVKSQNSGLVLGKLSGRHAVKDRLKELGYELDDEKLNAVFSLFRDLTKNKKRITDADLKALVTSSDEISLEKLNGANGLKSNGYIPVPQVSSNV

SEQ ID NO: 6753 - DNA, 1512 bp, Arabidopsis thaliana
  CDS (1)..(1512)
atggcttcgttacttctcacatcgtcgagtatgataaccactagctgtcgctccatggttctccggtcagggttacccatcggatcttcttttccctctcttcgcctgacccgtccatacgacaaggcgactctgttcgtctcatgttgctccgctgagtccaaaaaggtggcaactagtgctactgatctcaaacctatcatggaacggaggccggagtacattccgaacaagcttccccacaagaactatgtgcgtgtattagacacgacgcttcgtgacggtgaacaatctcccggtgcagcacttactccaccgcagaagttagagattgccaggcagctagctaaactccgagtagacatcatggaagttggttttccggtgtcgtctgaggaagaattcgaagctattaaaaccatcgccaagaccgtggggaacgaggtggatgaggaaaccggttacgttcctgtgatatgcggcattgcacgatgcaaaaagagagacatcgaggcaacttgggaggcactgaagtatgcgaagaggccgagggtaatgctattcacatctactagtgaaattcacatgaaatataagttgaaaaagactaaagaagaagtgatcgagatggccgtgaacagtgttaagtacgctaaaagcttgggcttcaaagacatccaatttgggtgcgaagatggcggcaggacggagaaagattttatatgtaagattctaggagaatcgataaaagcgggtgcaaccacggtggggtttgcggacacggtcgggatcaacatgccgcaagaattcggagaactcgtggcctatgtcatagaaaacactccaggggctgatgatattgtcttcgccattcattgtcataacgaccttggtgttgctaccgccaacacaatatccggtatatgtgcgggagcaagacaagtcgaagtgacgatcaacggaattggtgaaagaagtgggaatgcgccgcttgaagaggtcgtgatggctttgaaatgtcgaggagaatctctgatggatggtgtttacacaaaaatagactcacgccaaattatggctacaagcaagatggttcaagagcataccggcatgtatgttcaaccacataagccaatagttggagacaactgttttgttcatgagagcggcattcaccaggatggaatattgaaaaatcgaagtacatatgagatcttatcaccagaagatgttgggatcgtaaaatctgaaaattctggcattgttcttggaaagcttagcggacgtcatgctgtaaaagaccggcttaaagagttgggatatgaaatcagtgatgagaaattcaacgacatcttctcacgatacagagaattaacgaaggacaaaaagagaatcacagacgctgatctgaaggcattagtggtgaacggtgctgaaatctcatcagaaaaattaaacagtaaaggaattaacgaccttatgtcaagccctcagatttccgctgttgtataa

SEQ ID NO: 6754 - protein, 503 aa, Arabidopsis thaliana
MASLLLTSSSMITTSCRSMVLRSGLPIGSSFPSLRLTRPYDKATLFVSCCSAESKKVATSATDLKPIMERRPEYIPNKLPHKNYVRVLDTTLRDGEQSPGAALTPPQKLEIARQLAKLRVDIMEVGFPVSSEEEFEAIKTIAKTVGNEVDEETGYVPVICGIARCKKRDIEATWEALKYAKRPRVMLFTSTSEIHMKYKLKKTKEEVIEMAVNSVKYAKSLGFKDIQFGCEDGGRTEKDFICKILGESIKAGATTVGFADTVGINMPQEFGELVAYVIENTPGADDIVFAIHCHNDLGVATANTISGICAGARQVEVTINGIGERSGNAPLEEVVMALKCRGESLMDGVYTKIDSRQIMATSKMVQEHTGMYVQPHKPIVGDNCFVHESGIHQDGILKNRSTYEILSPEDVGIVKSENSGIVLGKLSGRHAVKDRLKELGYEISDEKFNDIFSRYRELTKDKKRITDADLKALVVNGAEISSEKLNSKGINDLMSSPQISAVV

SEQ ID NO: 6755 - DNA, 1635 bp, Nostoc sp. PCC 7120
  CDS (1)..(1635): transl_table=11
atgaccaaaaatccctcaccccacatttggctttatgacaccacactacgggatggcactcagcgcgaagggctatcaatttctacagaagacaagctacgcattgcccacagactcgatcaactagggattcccttcattgaaggtggatggccaggagccaaccctaaggatgttcaatttttctggcaacttcacgaagatccgctcaaacattcacaaattgttgcattttgttcaactcgccgccctcatactcatgccgcagatgaaccaatgctccaagatatcctggctgcgggttctagctgggtgacaatttttggcaaatcctgggatttacacgtcacaacaggtctaaaaactactttagaagaaaacttggcaatgatccgcgatactatcgagttttttcgctctcaagggcgatgcgtgatctatgatgctgaacactggtttgatggctataagcacaaccgagattatgctttacagaccctcaaggcagcaatgacagccggtgcagaatggttagtcctctgtgatacgaatggcggtactttacctcacgaagttagccagattgttcaagatgttgtcgaggtgactagggaagatttgacccaattaccaataccccaaatcggtattcatactcataatgattcagatatggctgttgccaatgctttagcagcagtaatggcaggggcgacaatggtacaaggtactatcaacggttatggcgaacgttgtgggaatgctaatttatgttcattaattcctaatctacaactgaaattagggtatagctgtatcacagaacaccagctaggacaactagcagaagccagccgatttgtgagtgaagtggtaaatcttgcccctgatgaacacgctccttttgtgggacgttcggcttttgctcacaaaggtggtattcatgtctccgccgtggaacgtaatcccctaacttatgaacacattcagccggaacaagtggggaaccgccgccggattgtcatttctgaacaagcggggattagtaatgtgttagctaaagcccggacttttggcattgaactcgacaagcaaacaccagaagccaagcaaattcttcagcgcctcaaggaattagaaagtgaaggatatcaatttgaagcagccgaagcgagttttgctttattgatgtatgaagctttgggcggaagacagcagttttttgaagttaaaggctttcaagtccactgtgatttagtggaaggcaaagaaatgaccaatgctttagcgacggtgaaagtcgcggtgaatggtaagaacattttagaagctgccgaaggtaatgggccagtagcagccttagatgcagcgttacgcaaagctttagtcaacttctatccccaacttgccacctttgagttaacagattacaaagtgcggattctcgacggtcacacaggcacttctgccaaaacccgtgccttagtcgaatcaggcaatggttatcaacgctggacaacggttggcgtttcaccgaacattttggcagcttcctatcaagcggttgtcgaaggtttggaatatggtctgttattacacgcccaagcagaagccgcagtaaaagcgtctggttaa

SEQ ID NO: 6756 - protein, 544 aa, Nostoc sp. PCC 7120
MTKNPSPHIWLYDTTLRDGTQREGLSISTEDKLRIAHRLDQLGIPFIEGGWPGANPKDVQFFWQLHEDPLKHSQIVAFCSTRRPHTHAADEPMLQDILAAGSSWVTIFGKSWDLHVTTGLKTTLEENLAMIRDTIEFFRSQGRCVIYDAEHWFDGYKHNRDYALQTLKAAMTAGAEWLVLCDTNGGTLPHEVSQIVQDVVEVTREDLTQLPIPQIGIHTHNDSDMAVANALAAVMAGATMVQGTINGYGERCGNANLCSLIPNLQLKLGYSCITEHQLGQLAEASRFVSEVVNLAPDEHAPFVGRSAFAHKGGIHVSAVERNPLTYEHIQPEQVGNRRRIVISEQAGISNVLAKARTFGIELDKQTPEAKQILQRLKELESEGYQFEAAEASFALLMYEALGGRQQFFEVKGFQVHCDLVEGKEMTNALATVKVAVNGKNILEAAEGNGPVAALDAALRKALVNFYPQLATFELTDYKVRILDGHTGTSAKTRALVESGNGYQRWTTVGVSPNILAASYQAVVEGLEYGLLLHAQAEAAVKASG

SEQ ID NO: 6757 - DNA, 1578 bp, Pyrobaculum aerophilum str. IM2
  CDS (1)..(1578): transl_table=11
gtgctggacacaactctccgagacggagcccaaggcgccaacgtctccttcgctctccaagacaagataagaattgccctgaagctcgacgagttaggcgtcgactatatagaggggggctggccctactcaaatcccaaagactaccagttcttcaaggcaatgaaggagtacccccttgccagggcgaagctggcggctttcggcagcactcggaggaaaaacactaggcccagccaagacgagagtttgaactcaattgtaaaggccgacgtccccgtcgctgtaatattcgggaagagctggactttacacgtggacaaagtgctggaggccactagggaggagaacctagccatgataagcgaaagcgttgagtacttgagggaacacggcatggaggtgatatacgacgccgagcatttctaccagggctatcaagaggatcccgaatacgccttggccactttagaggcggcgtggagggccggggcgagggtaatcgtgctggctgatacaaacggggggactccgccccacgaggtgtacagaataacggcggaggtgaggaggaggtttcccaacatgcccctaggcgcccacatgcacaacgacattggatgcgccgtggctaacactttaatggcggtggcggccggcgccagacacgtgcagggcactataaacggcataggggagaggaccggcaacgccgacctcgtccaaatcctgccttcgctggagttaaaaatggggcttagggtgttgagagaagaggcgcctcctgtgaagttcgcaaaactaagagaggtctcgaggtttgtgtacgaggcgctgggcctccagcctaacccctatcagccctatgtcggtgaattcgccttcgcccacaaaggcggcgtacacgcagacgccgttatgaaagtgccgagggcttacgagcacatagatccccagctagtgggcaacaggagagtgttcgtcgtgtcggagatggccgggggcgcgagcgttgttttaaaagccgcggaggtgctgggcctcgcccttaacaaaagagacgaggcggtgaggagggccctcgaggagattaaaatgctggagaaagaggggtattcctttgacgtcgcccccgcctcagccatgttaatcctgctgaggcatctgggcctctatagggagaggttcagaatactggagtggagagtggtcacggggccggccgaggcctcttacgccgttgtaaaagtcctagtggaggggaggacaatgttagaggccggggagggcgtcggccccgtacacgcaatagacgtggcattgagaaaggccctcgtgggggcgttccccgagctttccgacgtacagctcagagactacaaagtgatcctccccacggcagtgaagagcactgaaagcgtcgtgagagtggtgtcggagttcacagacggggagaggatctggcgaaccacgggggtgtccagcaatatagtaatggcgtctctcatggcgttgcgagacggatacgacttcgtattacaaacaaactcgcttaacaaaaacaatatcggcagatga

SEQ ID NO: 6758 - protein, 525 aa, Pyrobaculum aerophilum str. IM2
MLDTTLRDGAQGANVSFALQDKIRIALKLDELGVDYIEGGWPYSNPKDYQFFKAMKEYPLARAKLAAFGSTRRKNTRPSQDESLNSIVKADVPVAVIFGKSWTLHVDKVLEATREENLAMISESVEYLREHGMEVIYDAEHFYQGYQEDPEYALATLEAAWRAGARVIVLADTNGGTPPHEVYRITAEVRRRFPNMPLGAHMHNDIGCAVANTLMAVAAGARHVQGTINGIGERTGNADLVQILPSLELKMGLRVLREEAPPVKFAKLREVSRFVYEALGLQPNPYQPYVGEFAFAHKGGVHADAVMKVPRAYEHIDPQLVGNRRVFVVSEMAGGASVVLKAAEVLGLALNKRDEAVRRALEEIKMLEKEGYSFDVAPASAMLILLRHLGLYRERFRILEWRVVTGPAEASYAVVKVLVEGRTMLEAGEGVGPVHAIDVALRKALVGAFPELSDVQLRDYKVILPTAVKSTESVVRVVSEFTDGERIWRTTGVSSNIVMASLMALRDGYDFVLQTNSLNKNNIGR

SEQ ID NO: 6759 - DNA, 1131 bp, Chlorobium tepidum TLS
  CDS (1)..(1131): transl_table=11
gtgatccgcaaaccgtggatcatcgatacgaccctccgggatggagagcaggcccccggcgtggtgttcagtccgcacgaaaaaaagcggatagcagcaatgcttgcagaaaccggcgtcgatgagatcgaagtgggctacccggccatcagtgcggcggagcggaaggtgattcgcgagatcgtcgccatgaaactgccggtacgcctgacttcgtggtcgcgggccaatatggcggacatcgagttggcggcagaatgcggcaccgatgcggtgcacatcagttttccggcctcccggctctatctggagctgatacacaagaaggatgactggattcaggagcagcttcacgcgcttgtttccaaagctcgcgaacggttcgatttcgtcagcgtcggcggacaggacgccacgagaagtagcactgattttctgcaacgcttcatgctcgatgctgaagctgccggagccaaacggttcaggatcgccgatacggtaggcatcgccacgccggtgtcggtgatggccctcggcgcagcgttgcgccaaagctcgtcgctgccgctggagttccacgcgcacaacgatctcggcatggcgaccgccaacgccttcacggcactcaacgagggattcgaagcggtcagcgtgtcggtgaccggtctcggagagcgtgcgggcaacgcggccctcgaagagctggcaatggcgcttgcgctgaatggagacttcgacacgcatctcgacacatcgatgctctcccggctttgcgacgccgtggccacggcttccggacgagccattcaggagcaaaaaccggtggtcggacgttcagccttccagcacgaatcgggcattcattgcgccgcgctgttgcaggatccgctctcctaccagccgttcctgccgtcgcgggttggccgcagcgatttcgagatagtcatcggcaaacactcaggcacagcggcgatcatcgcccatttcaaccggcgcggaatcacgatttcgaaaaaggaggcccgcgaactgctcgatctgatccgtagtcagtccgaccgcctcaaacgggcgctccggaccgacgagatcgacgcgctccgtgaacaaaactctgtgaaacacgcttaa

SEQ ID NO: 6760 - protein, 376 aa, Chlorobium tepidum TLS
MIRKPWIIDTTLRDGEQAPGVVFSPHEKKRIAAMLAETGVDEIEVGYPAISAAERKVIREIVAMKLPVRLTSWSRANMADIELAAECGTDAVHISFPASRLYLELIHKKDDWIQEQLHALVSKARERFDFVSVGGQDATRSSTDFLQRFMLDAEAAGAKRFRIADTVGIATPVSVMALGAALRQSSSLPLEFHAHNDLGMATANAFTALNEGFEAVSVSVTGLGERAGNAALEELAMALALNGDFDTHLDTSMLSRLCDAVATASGRAIQEQKPVVGRSAFQHESGIHCAALLQDPLSYQPFLPSRVGRSDFEIVIGKHSGTAAIIAHFNRRGITISKKEARELLDLIRSQSDRLKRALRTDEIDALREQNSVKHA

SEQ ID NO: 6761 - DNA, 1566 bp, Streptococcus mutans UA159
  CDS (1)..(1566): transl_table=11
atgcgtaaggttgaatttcttgacacaacgctccgtgatggcgaacaaacaccgggggttaatttttcgattaaagaaaaagtagctattgccaagcaattggagaagtggggaatctctgatattgaagccggttttccagctgctagccctgactcttttgaagctgtgaagcaaattgcagcagcgatgacaacgactgctgtatcaggtctggctcgttctgtgaaatctgatattgatgcctgttatgaggcgcttaaggatgccaaatttccacaatgtcatgtctttattgcaaccagtcctattcatcgtgaatttaagcttaaaaaatccaaagaagaaattcttgaagtaattaaggaacatgtaacttatgcgcgctcaaaatttgatgtgattgaattttcaccagaggatgccacacgtacagaacttgatttcctattgcaggtagtgcaaactgctgtagatgctggcgctacttatattaatatccctgatacagttggctttaccacgccagtagaatttggccatattttcaagtatctcattgaaaatgttaaatctgaccgtgacattattttcagccctcattgtcatgatgacttaggaatggcaaccgctaataccctcgctgccattaaaaatggtgctggacgtgttgaaggaacggttaatggtatcggagaacgtgctggtaacgtagctcttgaagaagtggccgtagctcttaatattcgtgaagattactatgatgcgaccagtgctatcgttcttgatgagacagtgaccacttcagaaatggtatcacgtttctcgggtattcctattcctaaaaataaagctgttgttggtggcaatgctttttcacatgaatccggtattcatcaagatggttttcttaagaatcccctcacttatgaaattatcacgcctgaattggttggtgttaagaaaagttccctgccgcttgggaaattatctggccgtcatgcctttattgaaaaattaaaagaattgaagcttgattttgaagaaggagaggttgcacctctttttgcaaaatttaaatcgttggccgataaaaaacacgatatcacagatgctgatattagagctttggtagcagggactagtgttgaaaatcctgaaggtttccactttaaggacttaaggctgacatcaaatgatgacgacacgatcacagcacaagttattatggtcaatgagggtgaggaagaagtaactatcattgctaatggtaagggttctgttgaagctattttcaatgctgtcgataaattctttaatcaaactgttaagttagatagttataatatcgaggctgttactgatggtattgatgctcaggcacgtgtgctcgtttctgtggaaaatattgatacggataccattttcaatgcttctggtcttgactttgatgttttaaaagctagtgctattgcttatatcaatgctaatacctttgttcaaaaggaaaatgctggtgaaattggtcacaaagtttcagaacgtgattatccaagtaatgactag

SEQ ID NO: 6762 - protein, 521 aa, Streptococcus mutans UA159
MRKVEFLDTTLRDGEQTPGVNFSIKEKVAIAKQLEKWGISDIEAGFPAASPDSFEAVKQIAAAMTTTAVSGLARSVKSDIDACYEALKDAKFPQCHVFIATSPIHREFKLKKSKEEILEVIKEHVTYARSKFDVIEFSPEDATRTELDFLLQVVQTAVDAGATYINIPDTVGFTTPVEFGHIFKYLIENVKSDRDIIFSPHCHDDLGMATANTLAAIKNGAGRVEGTVNGIGERAGNVALEEVAVALNIREDYYDATSAIVLDETVTTSEMVSRFSGIPIPKNKAVVGGNAFSHESGIHQDGFLKNPLTYEIITPELVGVKKSSLPLGKLSGRHAFIEKLKELKLDFEEGEVAPLFAKFKSLADKKHDITDADIRALVAGTSVENPEGFHFKDLRLTSNDDDTITAQVIMVNEGEEEVTIIANGKGSVEAIFNAVDKFFNQTVKLDSYNIEAVTDGIDAQARVLVSVENIDTDTIFNASGLDFDVLKASAIAYINANTFVQKENAGEIGHKVSERDYPSND

SEQ ID NO: 6763 - DNA, 1131 bp, Wolinella succinogenes DSM 1740
  CDS (1)..(1131): transl_table=11
atgatcacgatcaacgacacaacgcttagggatggagagcaggctcccacggtggctttcacccaagaggagaagtgcgagatcgccaagcttctttatgaagcgggagcggatgagctagagattggaatcccagccatgggtgaggcagagcgcgaagacattagagccatcctctctctcgggcttcctttgcgcctcatgagctggaatcgagccacccaaagcgacctagaggcgagtttggcgtgtgggatgaaggcggtcgatctctcgattcctgtctcgactaaaatggtcgcggcgaagtttcgcgggaagtatgccaaagtgctctccaatctagaagagaccctcactatcgctaaaaaagaggggctttttgtctgtgtggggatggaggatacatcgcgcgcgaacgctcgattcctcaaggaggtgatcgcactggccatggagaggggtgcggatagagtgcgattttgtgatacggtgggtatcctcacgccactccagacctacagggcgattcgctctcttcggcgccattgcacgcttcctgttgagatgcactgccataatgattatgggatggcggtggcgaactctattgcaggaatcgaggcgggagcccaaagcgtcaatacgaccgtgataggaatcggtgagcgcgcagggaatgcgggatttgagcaggttcttttgagcctcatcgggcagtttggacaaaatcgtacactcgattctactattttgaaagcccttgtccaaaaggtcgccaaagccgcaggcgtggctctagcccccacggctcctgtggtggggagtcgcctcttttggcatgagagcggaattcatgccgatggaaatcaaaaaagcgagggcctctatgagcctttttcccctgaactggtgggtgcgagccgcgaataccctattggcaagcattcagggagtgccaatctaatctatcatctcaagcagtttgtcccactgatcgagaagggcgaagcgagcgatctactcccactggtgcgtgaaatcgtcaccaaaaacaaaaaacccctgagcgctaaagagctcttttgtctctacctctcgcacaagcgccactcccaaaaagaggggtaa

SEQ ID NO: 6764 - protein, 376 aa, Wolinella succinogenes DSM 1740
MITINDTTLRDGEQAPTVAFTQEEKCEIAKLLYEAGADELEIGIPAMGEAEREDIRAILSLGLPLRLMSWNRATQSDLEASLACGMKAVDLSIPVSTKMVAAKFRGKYAKVLSNLEETLTIAKKEGLFVCVGMEDTSRANARFLKEVIALAMERGADRVRFCDTVGILTPLQTYRAIRSLRRHCTLPVEMHCHNDYGMAVANSIAGIEAGAQSVNTTVIGIGERAGNAGFEQVLLSLIGQFGQNRTLDSTILKALVQKVAKAAGVALAPTAPVVGSRLFWHESGIHADGNQKSEGLYEPFSPELVGASREYPIGKHSGSANLIYHLKQFVPLIEKGEASDLLPLVREIVTKNKKPLSAKELFCLYLSHKRHSQKEG

SEQ ID NO: 6765 - DNA, 1194 bp, Rhodopseudomonas palustris CGA009
  CDS (1)..(1194): transl_table=11
atgtctgagatcaagtctgagatcgtccggccggatcagtcctgcggtttccagtccgccccaatcgtgctcaacgacaccacattgcgcgatggtgagcaggcgccgggtgttgccttctccaccgccgagaaggttgcgatcgcccgagcgctggcgcgcgccggcgtgccggaaatcgaggcggggacgcccgcgatgggcgtcgacgagatcgcggcgatccgcgccatcgtcgaagccggcctgccgctgacgacgattgcctggtgccggatgcgcaccgaggacgtcgatgccgcgctgaaggccggcgtggcgatggtcaatgtctcggtgccggtgtcggacgtgcagatcgccgccaagctcggcggcaagcggtcgaatgcgatcgagaccgtcaagcgcgtggtcggctatgctcgggaccgcggcctcgacgtcgccgtcggcggtgaggattcctcgcgagccgatcccgaattcctcgccgaggtgatcgccaccgcaaaggcatccggcgcgcgtcggtttcggatcgccgatacgctgagtgtgctcgacccattctccagccatgcgctgctggcgacgcttcgcgcctcgactgacctcgagctcgaattccacggccatgacgacctcggcctcgccaccgccaacacgctggctgcgctccgcgccggtgccagccatgcctcggtgacggtgatcggcctcggcgaacgtgccggcaatgcgccgcttgaagaggtcgcggtggcgctgaagcagctctatggccgcgacaccggcatcgtgctctcggagctcggcaacgtcgccgatctcgttgccaccgcagccgcccgtaccattccgttaaacaaggcgatcgtcggtgagcacgtcttcacccatgaatcgggaatacatgtcgatggcctgctcaaggatcagcgcacctaccagtcgctcgatccgaatttgttcggccgctccaaccgcattgtcatcggcaagcactccgggctatcggcgatcacctcgtcgctcgccaagttggatctgccggcgaccgcggacgaggcgcagggtatcctggccaaggtccgccgctatgcagtcacccacaagggcccggtcggcaacgagacattgattgcgatttggcgcgaggtccgcgagcggacgctcaccaactgcgcctga

SEQ ID NO: 6766 - protein, 397 aa, Rhodopseudomonas palustris CGA009
MSEIKSEIVRPDQSCGFQSAPIVLNDTTLRDGEQAPGVAFSTAEKVAIARALARAGVPEIEAGTPAMGVDEIAAIRAIVEAGLPLTTIAWCRMRTEDVDAALKAGVAMVNVSVPVSDVQIAAKLGGKRSNAIETVKRVVGYARDRGLDVAVGGEDSSRADPEFLAEVIATAKASGARRFRIADTLSVLDPFSSHALLATLRASTDLELEFHGHDDLGLATANTLAALRAGASHASVTVIGLGERAGNAPLEEVAVALKQLYGRDTGIVLSELGNVADLVATAAARTIPLNKAIVGEHVFTHESGIHVDGLLKDQRTYQSLDPNLFGRSNRIVIGKHSGLSAITSSLAKLDLPATADEAQGILAKVRRYAVTHKGPVGNETLIAIWREVRERTLTNCA

SEQ ID NO: 6767 - DNA, 1539 bp, Geobacter sulfurreducens PCA
  CDS (1)..(1539): transl_table=11
atggcagagcagaaaactatcaagatattcgatacaacactgcgtgacggagaacagtctcccggcaacagtatgaacatcgaggaaaaactcagggttgccaagcagctccaaaaactgaacgtagatgtaattgaagccggttttcccatcgcgtctgagggtgactttgaagcggtcatgcgggttgcacagaccattaagggccctgagattgcgggtctgtgccgcgccaacgacaaggatatagacagggcctgggaggctctcaagtatgctggcgagaaggggcgtatccatacctttattgccacctctgatatccatatgaagcacaagctgaagatgtccccgtcccaggtaatggatgcggcggtaaaggcggtgaagagggctaagtcgtacactcccaacgtggagttttcctgcgaggacgctgtacgaaccaacctgaaattcatggccgaggtggtagaggcagtcattgatgcgggggtgaccaccgtgaatatccccgatacggtgggctataccattccttttgaatacttcaatatcattaagtatctgaaggaaaacgttcccaatatcgagaaggcggtcatatccgtccactgccacaacgacctcggtctggcggttgcaaactccatcgccgcggttcaggcgggcgcgggccaggttgagtgcaccatcaacggtattggcgagcgtgcaggcaactgttccctggaagagtttgtcatggcaatccggactcgccacgatatccttccctttaagacgaacgtggcaacggaccagattgtgccggccagcagacttctttctaccatcaccggcattggcgttcagcccaacaaagctgttgtcggcgccaatgcctttgctcacgagtcgggcattcatcaacacggcgtcctgatggaaaagtccacttatgaaattatgaccccggaatcggttgggctccgggccaatgttctggttctcggcaagcattctggtcgtcacgcttttaaaaagcgccttaccgaactgggctatgagttgagcgacgaggatctgaataaagccttcgagcggttcaaggctcttgcggatatgaagaaggaggttttcgacgaagatctggacgccatcgtggcggacgaagttatgcgcccctccgagaagtatcggttggcacatatcacggtgacctgcggatcgtttgcggtggcaacagcaacagtgcagatggagatcgacggggtcgccgtgcgtactgcagagctgggggatggtcctgtcgatgccacactcaaggccatcaaaaagctcaccaagaccaaggcccgactccagcagtacaatgtaggctccattaccggtggtaccgatgctcagggcgaagtgacagtgcgcctcgttgacggtgatgagacggtggtcggccgcggttcatccaccgacatcatcgaggcatcggcaaaagcctatattaacgccctcaaccgtcttcatttcaggaaagaacgggcacccgagagcctgtaa

SEQ ID NO: 6768 - protein, 512 aa, Geobacter sulfurreducens PCA
MAEQKTIKIFDTTLRDGEQSPGNSMNIEEKLRVAKQLQKLNVDVIEAGFPIASEGDFEAVMRVAQTIKGPEIAGLCRANDKDIDRAWEALKYAGEKGRIHTFIATSDIHMKHKLKMSPSQVMDAAVKAVKRAKSYTPNVEFSCEDAVRTNLKFMAEVVEAVIDAGVTTVNIPDTVGYTIPFEYFNIIKYLKENVPNIEKAVISVHCHNDLGLAVANSIAAVQAGAGQVECTINGIGERAGNCSLEEFVMAIRTRHDILPFKTNVATDQIVPASRLLSTITGIGVQPNKAVVGANAFAHESGIHQHGVLMEKSTYEIMTPESVGLRANVLVLGKHSGRHAFKKRLTELGYELSDEDLNKAFERFKALADMKKEVFDEDLDAIVADEVMRPSEKYRLAHITVTCGSFAVATATVQMEIDGVAVRTAELGDGPVDATLKAIKKLTKTKARLQQYNVGSITGGTDAQGEVTVRLVDGDETVVGRGSSTDIIEASAKAYINALNRLHFRKERAPESL

SEQ ID NO: 6769 - DNA, 1161 bp, Methanococcus maripaludis S2
  CDS (1)..(1161): transl_table=11
atggactggaaagctgtatctccgtacaacccaaaattagatttaaaagactgttatttgtatgatacaacattgagagatggtgaacagacccctggagtttgttttgcaggagaccaaaaacttgaaattgctaagaaactggatgaacttaaaattaaacagattgaagcaggttttccaattgtttctgaaaatgaaagaaaagccatcaaatcaattactggagaaggcttaaatgcgcagattttagcattatcaagagttttaaaagaagatattgataaagccatcgaatgtgacgttgacgggataattacatttattgcaacttctccaatgcatttgaaatataaattacataagaatcttgatgaagtagaagaaatgggtatgaaagccgtagaatatgcaaaagatcacggcctttttgtagcattctccgcagaagatgcaacgagaacccctcttgaagacataattagaattcataaaaatgcagaagaacacggcgctgatagggtccatattgcagatactcttggatgtgcaacaccacaggcaatgtatcatatatgttctgaactaagcaaacacctgaaaaaagcacatattggagtacactgccacaatgactttggatttgcagttataaactcaatatacggtttaatcggtggtgcaaaagctgtatctaccacagttaatggtataggtgaaagagcaggaaatgctgcaattgaagaaattgcaatggccttaaaagtactttacgaccacgatatgggattaaatactgaaatactaactgaaatatctaaactcgttgaaaactattcaaaaatcaaaattcctgaaaataaaccgcttgttggagaaatggtattctaccatgaaagcggaatacacgtcgatgccgttttagaaaacccattaacatatgaaccatttttgcccgaaaaaatcggtcagaaaagaaaaattatccttggaaaacattccggttgtagggctgtcgcacacagactacaggaactcggacttgaagcttcaagagacgaattatgggaaattgtaaagaaaactaaagaaactagagaagacggtactgaaataagcgacgaagtgtttaaaaacattgcagaaaaaatcataaaataa

SEQ ID NO: 6770 - protein, 386 aa, Methanococcus maripaludis S2
MDWKAVSPYNPKLDLKDCYLYDTTLRDGEQTPGVCFAGDQKLEIAKKLDELKIKQIEAGFPIVSENERKAIKSITGEGLNAQILALSRVLKEDIDKAIECDVDGIITFIATSPMHLKYKLHKNLDEVEEMGMKAVEYAKDHGLFVAFSAEDATRTPLEDIIRIHKNAEEHGADRVHIADTLGCATPQAMYHICSELSKHLKKAHIGVHCHNDFGFAVINSIYGLIGGAKAVSTTVNGIGERAGNAAIEEIAMALKVLYDHDMGLNTEILTEISKLVENYSKIKIPENKPLVGEMVFYHESGIHVDAVLENPLTYEPFLPEKIGQKRKIILGKHSGCRAVAHRLQELGLEASRDELWEIVKKTKETREDGTEISDEVFKNIAEKIIK

SEQ ID NO: 6771 - DNA, 1545 bp, Methanococcus maripaludis S2
  CDS (1)..(1545): transl_table=11
atggaatcttatttaaacagcaatgaaattatcaaaaactccctaaaatcaatgaaactgccagaaaaagtacgtgtttttgacactacgctaagggatggagaacagactccaggagtctccctaatgcctgatcaaaaaatggatattgcaaaaaatctaagtgaaatcggtgttgatgcaatagaagcaggctttccagtttcttctgaaggagaacaggaatctattaaaaatataacgtccctagggctggatgcagaaatctgcggacttgcaagggctgttaaaaaagatatagatgttgcaattgactgtggagttgacagtatccacacatttattgctacgtccccgctacatcgggaatacaaattaaaaatgagtaaagaaaagattatcgacattgcagttgaatctatagaatatataaaagaacatggcgtaattgtagaattttccgcagaagacgctacaagaactgaacttgattatttaaaagaagtttacaaaaaagcagttgaagctggagctgaccggataaatgttccggataccgttggtgttatggttccaaattcgatgtcctatttaataaaagaattaaaaaacgatataaaagttccaatatccgtgcactgccacaatgactttggaattgctgtatcaaactctgttgcagcagttgaagctggagccgaacaggtacactgtactgtaaacggccttggtgaaagagcgggaaacgcatcactagaagaaaccgtgatgactttaaacatggtttatggaattaataccaatgtaaatacaaaaatgttaacaaaactttcaaaactggtttcacactacactggaattaaaacacagcctaataaagcaattgttggtgaaaattcatttgcacacgaaagtggaattcacgcacacggtgttttagcaaatgccctaacatacgaaccaattgatccagaaatagttggaaacagacgtagaattgttcttggaaaacacagcggtgctcacgcaataaaatcaaaactctcagaaatcggtgttgaagttggagaaatcgtttcagaagagcagttctgtgaaatagttgaaagagtaaaagcaattggcgataagggaaaaatcgtgacagatgcggatgtaatggcaattgcagaagatattactaaaagaacattgaaatctgaaagaatagtggatttagaacagtttgcagtaattactggaaatcatgtacttccaactgcaagcgttgcgttgaaagtaaaagataaaatttataaaacgtctgaacttggagtagggcctgttgatgctgcactaaaagcaattcaagccgcagttggtgaaaatatccgattaaacgaatacaacatcagtgcaatttctggaggaactgacgccattgcagaagttacagttagacttgaaaatcaagaaaaagaagttatagcaaaagctactggcgatgacgttgttaaagcatccgtagaagcagttatcgatggaataaacaaattaatgggttaa

SEQ ID NO: 6772 - protein, 514 aa, Methanococcus maripaludis S2
MESYLNSNEIIKNSLKSMKLPEKVRVFDTTLRDGEQTPGVSLMPDQKMDIAKNLSEIGVDAIEAGFPVSSEGEQESIKNITSLGLDAEICGLARAVKKDIDVAIDCGVDSIHTFIATSPLHREYKLKMSKEKIIDIAVESIEYIKEHGVIVEFSAEDATRTELDYLKEVYKKAVEAGADRINVPDTVGVMVPNSMSYLIKELKNDIKVPISVHCHNDFGIAVSNSVAAVEAGAEQVHCTVNGLGERAGNASLEETVMTLNMVYGINTNVNTKMLTKLSKLVSHYTGIKTQPNKAIVGENSFAHESGIHAHGVLANALTYEPIDPEIVGNRRRIVLGKHSGAHAIKSKLSEIGVEVGEIVSEEQFCEIVERVKAIGDKGKIVTDADVMAIAEDITKRTLKSERIVDLEQFAVITGNHVLPTASVALKVKDKIYKTSELGVGPVDAALKAIQAAVGENIRLNEYNISAISGGTDAIAEVTVRLENQEKEVIAKATGDDVVKASVEAVIDGINKLMG

SEQ ID NO: 6773 - DNA, 1458 bp, Magnaporthe grisea 70-15
  CDS (1)..(1458)
atgtgcccatcctgcgagcctgagcaagccgctgcctccaatggcaatgcgaacggcaatggcgcctccaatggcaatggaaaccacgacggaatgactggtattgagactcgccaagcacaaaacgcacgctaccagccatcacggaatccctaccagcccgtcggtgactttttgtccaacgtgaacaacttcaagatcattgagagcaccctgcgagagggcgagcagttcgccaatgccttcttcgacacggccaagaagattgagatcgccaaggcgctggacgactttggcgtcgactacatcgagctcaccagcccggctgcctcggagcagtccaggcttgactgcgctgccatctgcaagctgggactcaaggccaagatcctcacccacatcaggtgccacatggacgacgcgcgcatcgccgtcgagaccggtgttgacggcgtcgacattgtcatcggcacctcttcgttcctcatggagcactcgcacggcaaggacatgacctacatcaccaacacggccattgaggtcatcaactttgtcaagagcaagggcatcgaggtccgcttctcatccgaggactcgttccgcagcaacctggttgacctgctgagcatctactcgaccgtcgacaagattggtgtcaaccgtgtcggtattgctgataccgtcggttgcgcctcgccccgccaggtctacgacctggtcaagaccctgcgtggtgttgtctcttgtgacattgagacacacttccacaacgacactggctgtgccatctcaaatgctttttgcgctttggaggccggtgctacccacatcgacacgtgtgtcctgggtatcggcgagcgtaacggaattacccctcttggaggtctgatggctcgcatgattgtcggctccaaggactacgttctgagcaagtacaagctgcacaagctcaaggacattgaggagcttgttgccgacgccgttcaggtcaacattcctttcaataactacatcactggtttctgtgctttcacccacaaggccggtatccatgccaaggctattctcaagaacccctcaacatatgagattattgacccgactctgttcggcatcactcgctatgtccacttcgccagcagattgacgggatggaacgcaatcaagagcagagcatcgcagctcaacattgagatgacggatgagcagtgcaaggagtgcactgccaagatcaagctgttggctgacattaggccgatcgctatcgacgacgccgactccatcattcacgcattccaccgcagcatcaactcgggccagcctattcagtctctcggaagcctgctccccaacatgacggaggaggagaaggccgccctggcagatgtagagcgccgtgagtcgaacgatgccgagcaaccggcggccaagagggccaaggtcgaggctgttgcatga

SEQ ID NO: 6774 - protein, 485 aa, Magnaporthe grisea 70-15
MCPSCEPEQAAASNGNANGNGASNGNGNHDGMTGIETRQAQNARYQPSRNPYQPVGDFLSNVNNFKIIESTLREGEQFANAFFDTAKKIEIAKALDDFGVDYIELTSPAASEQSRLDCAAICKLGLKAKILTHIRCHMDDARIAVETGVDGVDIVIGTSSFLMEHSHGKDMTYITNTAIEVINFVKSKGIEVRFSSEDSFRSNLVDLLSIYSTVDKIGVNRVGIADTVGCASPRQVYDLVKTLRGVVSCDIETHFHNDTGCAISNAFCALEAGATHIDTCVLGIGERNGITPLGGLMARMIVGSKDYVLSKYKLHKLKDIEELVADAVQVNIPFNNYITGFCAFTHKAGIHAKAILKNPSTYEIIDPTLFGITRYVHFASRLTGWNAIKSRASQLNIEMTDEQCKECTAKIKLLADIRPIAIDDADSIIHAFHRSINSGQPIQSLGSLLPNMTEEEKAALADVERRESNDAEQPAAKRAKVEAVA

SEQ ID NO: 6775 - DNA, 1785 bp, Gibberella zeae PH-1
  CDS (1)..(1785)
atgaaaattgcaaagtcccagcgacaagacaaagcaaacaagcacacgacaccagatgcaaatgcagctactgcagctacacaaacagaagctctgtcaaatacggattgggaatacggaacattgcagtccaaccccgcaaagaacaagggcccccctaattggtggttcatatgtgtcttgcagcagcagcagcagcagcagcagcagcagcatactgtcataaattctctttctgccgcactctctaatcggactaatcccggccacagggtcagggtcggtcagggtctttgtaccgtgctagcaaagtttgccctcagcttggcgtatgatttgatagtgccaatgctcaagtgcgtcactctttatggaaactttttcatctctcctccgccattcggagctcagccattagcccaaatccacgtccccaagtcattgcccgcctcttctgctcgtgcttcggaatctccttcttcttccagataccccagatttcctttcctttcccatcatatcataacatcaaaactgcccatcatgtccaacgtcgaggtcacagagaacggggctgctcccaccatccacaagcctcaccacaatgctgctctgccttaccagtccgtcggcgactttctctcaaacaccaacaacttcaagatcattgagagcaccttgagagagggcgagcagtttgccaatgcctactttgacacagagaccaagatcaagattgccaaggctctctctgactttggtgtcgagtacattgagctcaccagccctctcgcctctccccagtcccgcaaggactgtgaggagatctgcaagctcggcctcaaggccaagatcctcactcacgtgcgatgcacaatggaagatgccaaggtcgctgttgagaccggtgtcgacggtgtcgatgttgttattggtacttctcagtacctgagagagcactctcacggaaaggacatggcttacatcaaggagtctgccattgaggtcatccgatacatcaagagccaaggcaaggaggtccgattctcttctgaggactctttccgaagtgaccttgtcgaccttctcagcctttaccaggctgttgacaaggagggtgttcaccgtgttggtgtcgctgacacagtcggctgcgcttctcctcgccaggtctacgaccttgtccgaactctccgtggtgttgtcggctgcgacatcgagtgccatttccacaacgacactggctgtgccattgccaacgcccacgctgccctcgaggccggagccacccacatcgacacctcagtcctcggaatcggcgagcgcaacggtatcacccctctcggaggtctcttggcccgtatgattgtcaacagccacgactacgtcacctctcgatacaagctccacaagctcaaggagattgaggatctcgtcgccgaggctgtcgagattaatgtccccttcaacaactacatcaccggtttctgtgcctttacccacaaggccggtatccacgccaaggctatcctcaaccagcccagcacatacgagatcatcgaccctgctgatttcggcatgtcccgatatgttcacttcgcttctagattgactggctggaacgccatcaagagtcgtgttgagcagctcggattgaacatgactgatgatcagatcaagcaagttactgccaagatcaaggacctggctgatgtgcgtcctctcgctattgacgatacggattcaattatccgctctttccactttgatcttcagagatcttag

SEQ ID NO: 6776 - protein, 594 aa, Gibberella zeae PH-1
MKIAKSQRQDKANKHTTPDANAATAATQTEALSNTDWEYGTLQSNPAKNKGPPNWWFICVLQQQQQQQQQQHTVINSLSAALSNRTNPGHRVRVGQGLCTVLAKFALSLAYDLIVPMLKCVTLYGNFFISPPPFGAQPLAQIHVPKSLPASSARASESPSSSRYPRFPFLSHHIITSKLPIMSNVEVTENGAAPTIHKPHHNAALPYQSVGDFLSNTNNFKIIESTLREGEQFANAYFDTETKIKIAKALSDFGVEYIELTSPLASPQSRKDCEEICKLGLKAKILTHVRCTMEDAKVAVETGVDGVDVVIGTSQYLREHSHGKDMAYIKESAIEVIRYIKSQGKEVRFSSEDSFRSDLVDLLSLYQAVDKEGVHRVGVADTVGCASPRQVYDLVRTLRGVVGCDIECHFHNDTGCAIANAHAALEAGATHIDTSVLGIGERNGITPLGGLLARMIVNSHDYVTSRYKLHKLKEIEDLVAEAVEINVPFNNYITGFCAFTHKAGIHAKAILNQPSTYEIIDPADFGMSRYVHFASRLTGWNAIKSRVEQLGLNMTDDQIKQVTAKIKDLADVRPLAIDDTDSIIRSFHFDLQRS

SEQ ID NO: 6777 - DNA, 1296 bp, Candida glabrata CBS 138
  CDS (1)..(1296)
atgaccgcaaataataatccatacgcgccaagtccaactgattacttgtccaacgttaacagctttcaattaattgactcgacgctgagagaaggtgagcaatttgctaatgcgttttttgataccgaaaagaagatagagattgcaaaggctctggatgactttggtgtcgactatattgagctgacatccccagttgcttctgaacagtcttacaaagattgtaaggcaatctgtaatctagggttgaaggcaaaaattctgacccacattcgttgccacatggacgatgccaaagtggccgttgagactggtgttgatggtgttgatgttgtcatcggtacatccaagtttttaaggcaatactctcatggtaaggacatgaactatattgccaagagtgccattgaggttatcgaatttgttaaatccaaaggcattgagatcagattttcttctgaagatagtttcagaagtgacctggtcgatctgctgaatatttacaagactgtcgacaagatcggtgtcaacagagtcggtattgccgacactgttggttgcgccaaccctagacaagtttacgaattggtaaggactttgaaatctgtggtttcctgtgatattgagtgccatttccataatgatacagggtgtgccattgcaaatgcatacaccgcattggaaggtggtgctaagttgatagatgtcagtgttctgggtattggtgaaagaaatggtattaccccgctaggtggtctgatggccagaatgattgtagccgcaccagactatgtcaaatccaagtacaaattgcataagatcagagatatcgaaaaccttgttgcagaggcagttgaggttaatatccctttcaataacccaattactggtttctgtgctttcacacacaaagctggtattcacgctaaagccattctagcgaacccatccacatatgaaatcctggacccacatgatttcggtatgaagagatatatacattttgctaacaggcttacaggttggaacgccatcaaggcgagagttgatcaattgaacttgaatttgaccgatgatcaaatcaaggaagttaccgccaagatcaagaaactaggtgatgtcagacctctaaatattgatgatgtggattctataatcaaggacttccatgcagaaattactacaccacaactacgcagtattaatggccaagctaggaccagtgctattgacctacaaagcttggacacagtagaagaaaatgagccagctcaaaagaaagcaagagttgattaa

SEQ ID NO: 6778 - protein, 431 aa, Candida glabrata CBS 138
MTANNNPYAPSPTDYLSNVNSFQLIDSTLREGEQFANAFFDTEKKIEIAKALDDFGVDYIELTSPVASEQSYKDCKAICNLGLKAKILTHIRCHMDDAKVAVETGVDGVDVVIGTSKFLRQYSHGKDMNYIAKSAIEVIEFVKSKGIEIRFSSEDSFRSDLVDLLNIYKTVDKIGVNRVGIADTVGCANPRQVYELVRTLKSVVSCDIECHFHNDTGCAIANAYTALEGGAKLIDVSVLGIGERNGITPLGGLMARMIVAAPDYVKSKYKLHKIRDIENLVAEAVEVNIPFNNPITGFCAFTHKAGIHAKAILANPSTYEILDPHDFGMKRYIHFANRLTGWNAIKARVDQLNLNLTDDQIKEVTAKIKKLGDVRPLNIDDVDSIIKDFHAEITTPQLRSINGQARTSAIDLQSLDTVEENEPAQKKARVD

SEQ ID NO: 6779 - DNA, 1314 bp, Candida glabrata CBS 138
  CDS (1)..(1314)
atggatcaataccaacaagtaactgaatcaactccaactgtggagacaagtaatccatatggaccaaacccagctgacttcttgtccaatgtcaaggaatttcaactgattgactctaccttgagagaaggtgagcaatttgccaatgctttcttcgacactgagaagaagattgaaattgccaaggccttggatgacttcggtgtcgactacattgaattgacctctccagtggcctctgagcagtctttcagagattgtaaggctatttgcaacctgggattaaaggcaaagattcttacccacattcgttgtcacatggacgatgccaaggtggccgttgagactggtgtcgatggtgttgatgttgtcattggtacttccaagttcttgagacagtactcccacggtaaggacatgaattatattgccaagagtgccattgaggtcatcgagttcgttaagtcaaagggtattgagatcagattttcctccgaagatagtttcagaagtgacctggttgatctactgaatatttataagactgtcgacaagatcggtgtcaacagagttggtattgctgatactgttggctgtgctaacccaagacaagtttacgagttggtcagaactttgaagtctgtggtctcctgtgacattgagtgtcatttccataacgatactggttgtgccatcgctaatgcttacacggctctagaaggtggtgccaagctaatagatgtcagtgttctaggtattggtgaaagaaacggtatcacaccattgggtggtctaatggctagaatgattgtcgccgctccagaatatgtcaagtccaagtacaagctgcacaagatcagagacattgagaatttggtcgccgaagctgttgaagtcaacattccattcaacaacccaatcactggtttctgtgccttcacacacaaggctggtatccacgccaaggccattcttgccaacccatccacatacgaaatccttgacccacatgatttcggtatgaagagatatatacattttgctaacaggctaacaggctggaacgccattaagtcgagagttgatcaattgaacttgaacttgacagatgaccaagtcaaggaagttaccactaagattaagaagctgggtgatatcagacctctgaatatcgacgatgttgactccattatcaaggacttccacgctgatctagcgacaccaatggtcagaccaaccgaagacggtgctgacaacgaagagccactacaacttgatgaaccagctaagaagaaatctaagctatcccaataa

SEQ ID NO: 6780 - protein, 437 aa, Candida glabrata CBS 138
MDQYQQVTESTPTVETSNPYGPNPADFLSNVKEFQLIDSTLREGEQFANAFFDTEKKIEIAKALDDFGVDYIELTSPVASEQSFRDCKAICNLGLKAKILTHIRCHMDDAKVAVETGVDGVDVVIGTSKFLRQYSHGKDMNYIAKSAIEVIEFVKSKGIEIRFSSEDSFRSDLVDLLNIYKTVDKIGVNRVGIADTVGCANPRQVYELVRTLKSVVSCDIECHFHNDTGCAIANAYTALEGGAKLIDVSVLGIGERNGITPLGGLMARMIVAAPEYVKSKYKLHKIRDIENLVAEAVEVNIPFNNPITGFCAFTHKAGIHAKAILANPSTYEILDPHDFGMKRYIHFANRLTGWNAIKSRVDQLNLNLTDDQVKEVTTKIKKLGDIRPLNIDDVDSIIKDFHADLATPMVRPTEDGADNEEPLQLDEPAKKKSKLSQ

SEQ ID NO: 6781 - DNA, 1182 bp, Kluyveromyces lactis NRRL Y-1140
  CDS (1)..(1182)
atgtccgtaaattcgaatccatatgccccatctccaaatgatttattatcaaatgtttgcaacttccagctaatcgaatcaaccctaagagaaggtgagcaatttgcaagtgcatttttctctactgagaagaaaatcgaaatcgccaaggctttagatgatttcggtgtcgattatatcgaacttacctctccggtggcctctgaacaatctagaagcgattgtgaagcaatctgtaagctgggcttgaaggctaagattttgacgcatattcgttgtcatatggatgatgctagagtcgctgttgaaactggtgttgacggtgtcgatgtcgtcatcggtacttccaaatttttgagagaatattctcatggtaaagatatgaactacatagcgaaatcagctatcgaagttatcgaattcgttaaatccaagggtctagagatcagattttcctctgaagattctttcagatcagatattgttgatcttttgaacatttacaagactgtggataagatcggtgtcaacagagtcggtattgctgacaccgttggttgcgcaaacccaagacaagtatatgagctagtcagaacattgaagagtgtagtttcttgtgatatcgaatgtcatttccatgatgatactggttgtgctatcggtaactcatattctgcgttagaagccggcgccagattaatcgatgtctccgtgttgggtattggtgaaagaaacggtatcacctctcttggtggtctaatggcaagaatgattgtatctgccccagaatacgtcaagtccaaatataagctacacaagctacgtgatttggaaaatctagtcgcagatgctgtcagtgttaatgtgccatttaacaaccctatcactggattctgtgcattcacacataaggctggtattcatgccaaggccatcttggctaacccatctacgtacgaaattctaaatccagaagatttcggtatgaagagatatattcactttgccaacagattaactggttggaacgcaatcaagtctcgtgtcgaacaactaaatttgcatttatccgatgaccaaattaaggaagtaacatctaagattaaacagataggtgatgtcaggcaactaagtatcgaagatgtcgatactatcatcaaggactaccattctgaactataa

SEQ ID NO: 6782 - protein, 393 aa, Kluyveromyces lactis NRRL Y-1140
MSVNSNPYAPSPNDLLSNVCNFQLIESTLREGEQFASAFFSTEKKIEIAKALDDFGVDYIELTSPVASEQSRSDCEAICKLGLKAKILTHIRCHMDDARVAVETGVDGVDVVIGTSKFLREYSHGKDMNYIAKSAIEVIEFVKSKGLEIRFSSEDSFRSDIVDLLNIYKTVDKIGVNRVGIADTVGCANPRQVYELVRTLKSVVSCDIECHFHDDTGCAIGNSYSALEAGARLIDVSVLGIGERNGITSLGGLMARMIVSAPEYVKSKYKLHKLRDLENLVADAVSVNVPFNNPITGFCAFTHKAGIHAKAILANPSTYEILNPEDFGMKRYIHFANRLTGWNAIKSRVEQLNLHLSDDQIKEVTSKIKQIGDVRQLSIEDVDTIIKDYHSEL

SEQ ID NO: 6783 - DNA, 1326 bp, Kluyveromyces lactis NRRL Y-1140
  CDS (1)..(1326)
atgagtagcaatcaggatttccaaccagtgactgaatctgcatcaagtgtgacaaaatttcaacaaaatccatacggtccaaacccagctgattatttatcaaatgttaacaactatcagttgatcgattctacattaagagaaggtgaacaatttgccaacgcctttttcgatactgaaaagaagatcgagattgccaaggccctagatgactttggtgttgattatattgaacttacttctcctgtcgcatctgaacaatctagaagagattgtgaagccatttgcaagcttggattgaaggcaaagattttgacccatatccgttgtcacatggacgatgctagagtggcagtagaaactggtgttgatggtgttgatgttgttatcggtacttccaagtttttgagacaatattctcacggtaaggacatgaattacattgccaagtctgctattgaagtcattgaatttgtcaaatccaagggtattgaaatcagattctcttctgaggattctttcagatcggatttggtcgatttgctaaacatttacaagactgtcgataagattggtgttaacagagttggtattgctgataccgtcggatgtgctaatccaagacaagtttacgaattggtcagaacattgaagagtgtggtttcatgtgatatcgaatgccatttccacaacgacaccggttgtgctattgcaaacgcttacacagcattagaaggtggtgcaagacttatcgatgtcgctgtattaggtatcggtgagagaaatggtatcactcctctaggtgggctaatggctagaatgattgttgcagctccagagtacaccaaatctaagtacaaattgcataagatcagagatatcgaaaacttgattgctgaagccgtggaggtaaatatcccattcaacaacccaattacaggattctgtgccttcacacataaagctggtattcatgctaaggccatcttggctaacccatctacatacgaaatcttggaccctcacgatttcggtatgaagagatacatccatttcgctaacaggcttaccggttggaacgctatcaagtcacgtgttgatcaattaaacttgaacttgacagatgatcaagtcaaagaagttaccgctaagattaagaagcttggtgacatcagacccctaaatatcgatgatgtcgactccatcatcaaggacttccatgctgaagtatctacgccgcaattgagagctgtaagaagagatgacaacgacgtcaatgacattgatatccaagagccatccaacaagaaaaccaaggtagagtaa

SEQ ID NO: 6784 - protein, 441 aa, Kluyveromyces lactis NRRL Y-1140
MSSNQDFQPVTESASSVTKFQQNPYGPNPADYLSNVNNYQLIDSTLREGEQFANAFFDTEKKIEIAKALDDFGVDYIELTSPVASEQSRRDCEAICKLGLKAKILTHIRCHMDDARVAVETGVDGVDVVIGTSKFLRQYSHGKDMNYIAKSAIEVIEFVKSKGIEIRFSSEDSFRSDLVDLLNIYKTVDKIGVNRVGIADTVGCANPRQVYELVRTLKSVVSCDIECHFHNDTGCAIANAYTALEGGARLIDVAVLGIGERNGITPLGGLMARMIVAAPEYTKSKYKLHKIRDIENLIAEAVEVNIPFNNPITGFCAFTHKAGIHAKAILANPSTYEILDPHDFGMKRYIHFANRLTGWNAIKSRVDQLNLNLTDDQVKEVTAKIKKLGDIRPLNIDDVDSIIKDFHAEVSTPQLRAVRRDDNDVNDIDIQEPSNKKTKVE

SEQ ID NO: 6785 - DNA, 1320 bp, Debaryomyces hansenii CBS767
  CDS (1)..(1320)
atgtcggctcctgaaggctttaaaaaggtcagtgaagacgcacataaatcaaatcaagaaatcaattctaatccatacgggccaaacccagcagacttcttatccaatgtttcaaactttcaattaatcgaatctacgttaagagaaggtgagcagttcgcaaatgccttcttttcaactgagaaaaagattgagatcgctaaggctttagatgaatttggtgtcgattatattgaattgacatcaccagttgcttctgaacagagtagaaaggactgtgaagccatttgtaaattaggtttaaaggccaagatcttaacacacattagatgtcatatggatgacgcaagagttgcagtcgagactggtgttgatggtgtcgatgttgtcatcggtacatctcaattcttgagacaattttctcacggtaaggatatgaactacattgcggaatctgccgttgaagttattgaattcgttaaatccaagggtatagaaatcaggttctcgtctgaagattcctttagatctgacttggttgatttattgaatatctacaagacagtcgataagattggtgtcaatagagtgggtattgccgacactgtgggttgtgctaatccaagacaagtctacgaattagttagaactttaagatctgttgttcattgtgatattgaatgtcatttccataacgatactggttgtgccattgccaatgcctacactgctttggaaggtggtgctagactcatagatgtatcagttcttggtatcggtgaaagaaacggtattactcctttgggtggcttgatggccagaatggttgctgctgacagagattatgttttatccaaatataaattgcataaattaagagacttggaaaacttggttgctgaagcggttcaggttaatattccattcaataatcctattactggattctgtgcattcacccataaagctggtattcatgctaaagctattttggctaatccttcgacatacgaaattttaagtcctgcagattttgggttgactagatacattcatttcgccaacagattaactggttggaatgctatcaagtcaagagttgatcaattaaacttacaattatctgatgagcaatgtaaggaagtcaccaacaagattaagaaattgggtgatgttagacagttgaccattgatgacgtcgattccattatcaaagatttccatgctgatgttgctactcctcatgtgagaccaacggaacctgttccccatgtgattgaaggcttggaagaatcggatgttaagagatctaaaaattaa

SEQ ID NO: 6786 - protein, 439 aa, Debaryomyces hansenii CBS767
MSAPEGFKKVSEDAHKSNQEINSNPYGPNPADFLSNVSNFQLIESTLREGEQFANAFFSTEKKIEIAKALDEFGVDYIELTSPVASEQSRKDCEAICKLGLKAKILTHIRCHMDDARVAVETGVDGVDVVIGTSQFLRQFSHGKDMNYIAESAVEVIEFVKSKGIEIRFSSEDSFRSDLVDLLNIYKTVDKIGVNRVGIADTVGCANPRQVYELVRTLRSVVHCDIECHFHNDTGCAIANAYTALEGGARLIDVSVLGIGERNGITPLGGLMARMVAADRDYVLSKYKLHKLRDLENLVAEAVQVNIPFNNPITGFCAFTHKAGIHAKAILANPSTYEILSPADFGLTRYIHFANRLTGWNAIKSRVDQLNLQLSDEQCKEVTNKIKKLGDVRQLTIDDVDSIIKDFHADVATPHVRPTEPVPHVIEGLEESDVKRSKN

SEQ ID NO: 6787 - DNA, 1263 bp, Debaryomyces hansenii CBS767
  CDS (1)..(1263)
atgtccattcaatcgaatccatatggtccaaatccatccgacttcttatcgaatgttaacaaattcgaagttatcgaatctactttaagagaaggtgaacaattcgccaacgctttcttcagtaccgagaagaaaatcgaaattgctaaagcattagatgacttcggtgttgactatattgaattgacttccccagttgcttctgaacaaagtagaagtgattgtgaagccatttgtaaattaggtttaaaagccaagattttgacccatattagatgtcatatggacgatgctagagttgccgttgaaactggtgttgacggtgttgatgttgttattggtacttcccaattcttaagacaatactcacatggtaaagacatgaactacattgctcaatctgctattgaagtgattgagttcgtcaaatctaaaggtattgaaattagattttcatccgaagattccttcagatctgatatcgttgatttgttgaacatctatagaactgttgataaaatcggtgttaatagagtcggtattgctgatactgttggttgtgccaacccaagacaagtttacgaattagttaagaccttgaaatccgttgtttcatgtgatattgaatgtcatttccacaacgatactggttgtgctattgctaacgcttacaccgctttagaagctggtgctaagttgattgatgtttctgtcttaggtattggtgaaagaaatggtattactccattaggtgctttaatggcaagaatgatcactgccgacagagactacgttttatccaagtataagttacacaaattaagagacttagagaatttggttgctgatgccgttcaagtcaacgttcctttcaacaacccaatcactggtttctgtgccttcactcacaaggccggtatccatgctaaggccattttagccaacccatctacatatgaaattttaaacccttcagatttcggtttgactagatatattcatttcgctaacagattaactggttggaatgcaatcaaatcaagagtcgatcaattgaacttgcacttaactgacgaccaatgtaaagaagtcactactaagattaagataatgggtgatgttagacaattaaatattgatgacgttgattctatcatcaaagatttccatgctgatttgtctactccgttattaaagccacaagctgaaggtgacaaagacgttaccgaggaaccagtttctaagaagcaaaagtcaggttaa

SEQ ID NO: 6788 - protein, 420 aa, Debaryomyces hansenii CBS767
MSIQSNPYGPNPSDFLSNVNKFEVIESTLREGEQFANAFFSTEKKIEIAKALDDFGVDYIELTSPVASEQSRSDCEAICKLGLKAKILTHIRCHMDDARVAVETGVDGVDVVIGTSQFLRQYSHGKDMNYIAQSAIEVIEFVKSKGIEIRFSSEDSFRSDIVDLLNIYRTVDKIGVNRVGIADTVGCANPRQVYELVKTLKSVVSCDIECHFHNDTGCAIANAYTALEAGAKLIDVSVLGIGERNGITPLGALMARMITADRDYVLSKYKLHKLRDLENLVADAVQVNVPFNNPITGFCAFTHKAGIHAKAILANPSTYEILNPSDFGLTRYIHFANRLTGWNAIKSRVDQLNLHLTDDQCKEVTTKIKIMGDVRQLNIDDVDSIIKDFHADLSTPLLKPQAEGDKDVTEEPVSKKQKSG

SEQ ID NO: 6789 - DNA, 1338 bp, Aspergillus nidulans FGSC A4
  CDS (1)..(1338)
atgtgccctggagaccaccccggtttcaccgcggttcagacccgccagaaccctcatccttcccgtaacccctacggtcacaatgtcggcgtgactgattttttgagcaatgtctcccgcttcaagatcatcgagagtactcttcgtgagggcgaacagttcgccaacgctttctttgatacccagaagaagattgaaattgccaaggcattggatgagtttggagtcgactacattgaacttactagcccttgtgcttctgaacagtcaaggcttgactgcgaagccatctgcaaacttggcttgaaggccaagatcctcactcatattcgatgccacatggatgacgctcgggtcgctgtcgagactggtgttgacggagtcgacgtcgtcattggaacttcctcgtatctccgcgagcactctcacggcaaggacatgacctacattaagaacaccgccatcgaagttattgaattcgtcaaatccaagggcatcgaaatccgattctccagcgaggactctttccgctccgacctcgtcgacctgctttccatctactcagccgtcgaccaagttggtgtgaaccgcgttggtattgcagacactgttggctgcgcttctcctcgccaggtgtacgagctcatccgtgttctgaggggagttgtgagctgtgacattgaaactcacttccacaacgacactggttgcgccattgccaatgcttactgtgctctcgaggctggtgctactcacattgatacctctgtccttggtattggtgagcgcaatggtattactcctcttggtggtctcatggctcgcatgatggtcgccgacccccagtacgtcaagagcaagtataagctggagaagcttaaggatattgaggaccttgtcgccgaggctgttgaggtcaacattcccttcaacaactacatcaccggtttctgtgccttcacccacaaggcgggtatccacgccaaggctatcctgaacaaccccagcacctacgagatcatcaaccccgctgatttcggcatgtcaagatatgtgcacttcgcgtctcgtctaacaggctggaacgctatcaagtcgcgtgctcaacagcttaacgtccacatgactgacgatcagtacaaggagtgcacggccaagatcaaggctcttgctgacatccgacctattgctattgatgatgcggatagcatcatccgtgcttattaccgcaaccttagctccggcgagaacaagcccctcatggatctgactgccgatgagcacgctcagttcctcgccaaggaaaaggagcttaccgagagtggcaccgctctttaa

SEQ ID NO: 6790 - protein, 445 aa, Aspergillus nidulans FGSC A4
MCPGDHPGFTAVQTRQNPHPSRNPYGHNVGVTDFLSNVSRFKIIESTLREGEQFANAFFDTQKKIEIAKALDEFGVDYIELTSPCASEQSRLDCEAICKLGLKAKILTHIRCHMDDARVAVETGVDGVDVVIGTSSYLREHSHGKDMTYIKNTAIEVIEFVKSKGIEIRFSSEDSFRSDLVDLLSIYSAVDQVGVNRVGIADTVGCASPRQVYELIRVLRGVVSCDIETHFHNDTGCAIANAYCALEAGATHIDTSVLGIGERNGITPLGGLMARMMVADPQYVKSKYKLEKLKDIEDLVAEAVEVNIPFNNYITGFCAFTHKAGIHAKAILNNPSTYEIINPADFGMSRYVHFASRLTGWNAIKSRAQQLNVHMTDDQYKECTAKIKALADIRPIAIDDADSIIRAYYRNLSSGENKPLMDLTADEHAQFLAKEKELTESGTAL

SEQ ID NO: 6791 - DNA, 1254 bp, Candida albicans SC5314
  CDS (1)..(1254): transl_table=12
atgtctgttgcttctaatccatatggtccaaatccatctgatttcttatctaatgtgaataaatttgaagtcattgaatcaactttaagagaaggtgaacaatttgccaatgcctttttcaccactgaaaaaaaaattgaaattgctaaagctttagatgattttggagttgattatattgaattgacttcaccagtagcatctgaacaatcaagaagagattgtgaagccatttgtaaattaggtttaaaagctaaaatattgactcatattagatgtcatatggatgatgcccgtgttgccgttgaaactggggttgatggggttgatgtggttattggaacttcacaatttttaagacaatattctcatggtaaagatatgaattatattgctcaaagtgctattgaagtcattgaatttgttaaatctaaaggtattgaaattcgttttagttctgaagattcttttagatcagatattgttgatttattaaacatttatcgtactgttgataaaatcggagtgaatagagttggtattgccgatactgttggttgtgctaatccaagacaagtttatgaattggtcaaaactttgaaatcagtggtttcttgtgatattgaatgtcatttccataacgatactggttgtgccattgctaatgcttatactgccttggaagccggtgctaaattaattgatgtttctgtgttgggtattggtgaaaggaatggtattactccattgggggcattaatggcaagaatgattactgctgatcgtgattatgtgttatctaaatataaattacacaaattgagagatttagaaaatttggttgctgatgccgtacaaattaatattccattcaataatccaattactggattctgtgcttttactcataaagctggtattcatgctaaagccatcttggccaatccatcaacatatgaaattttaaatccaaatgatttcggtttaaccagatatattcactttgctaatagattgactggttggaatgccattaaatcaagagttgatcaattgaatttacatttgactgatgatcaagttaaagaagttacgaataaaattaaaaaattgggtgatgttagacaattgaacattgatgatgtcgattcaattattaaagatttccatgctgaacaaagcactactaatactcctcttttaaaaccagtagaggatgatgaaggtccagaaattaaaaaacaaaaagtatag

SEQ ID NO: 6792 - protein, 417 aa, Candida albicans SC5314
MSVASNPYGPNPSDFLSNVNKFEVIESTLREGEQFANAFFTTEKKIEIAKALDDFGVDYIELTSPVASEQSRRDCEAICKLGLKAKILTHIRCHMDDARVAVETGVDGVDVVIGTSQFLRQYSHGKDMNYIAQSAIEVIEFVKSKGIEIRFSSEDSFRSDIVDLLNIYRTVDKIGVNRVGIADTVGCANPRQVYELVKTLKSVVSCDIECHFHNDTGCAIANAYTALEAGAKLIDVSVLGIGERNGITPLGALMARMITADRDYVLSKYKLHKLRDLENLVADAVQINIPFNNPITGFCAFTHKAGIHAKAILANPSTYEILNPNDFGLTRYIHFANRLTGWNAIKSRVDQLNLHLTDDQVKEVTNKIKKLGDVRQLNIDDVDSIIKDFHAEQSTTNTPLLKPVEDDEGPEIKKQKV

SEQ ID NO: 6793 - DNA, 1287 bp, Candida albicans SC5314
  CDS (1)..(1287): transl_table=12
atggttgacggatataaagaagtatcagaatcatttgatcgttccaaaatccaacataacccttatggtcctaatccaggtgattttctttcgaatgttggcaattttcaattgattgaatcaactttgagagaaggtgaacagtttgccaatgcatttttcagcaccgaaaccaaaattgaaattgctaaagccttagatgattttggggttgattatattgaattgacttcaccagtggcatctgaacaatcaagaaaagattgtgaagccatttgtaaattaggtttaaaagccaaaatattgactcacattagatgtcatatggatgatgccagagttgctgttgaaactggggtcgatggagttgatgtggttattggaacttcccaatttttaagacaatactctcatggtaaggatatgaattatattgcacaaagtgctattgaagtcattgaatttgtcaaatctaaaggtattgaaatccgtttcagttctgaagattcttttagatcagatttggttgatttattaaacatttaccgtactgttgataaaattggggttaacagagttggtattgctgatactgttggttgtgctaatccaagacaagtttatgaattggtgagaacattgaaatcagtagtcaagtgtgacattgaatgtcatttccataatgatactggctgtgccattgccaatgcatacacagctttggaaggtggggccagattgattgatgtttccgtattgggtattggtgaaagaaatggtattactccattgggtgggttaatggcgagaatgattgctgctgatcgtgaatatgttttgtcaaaatataaagttcataaattgagagatattgaaaatttggttgctgaggcggttcaagttaacattccattcaataatccgatcactgggttctgtgctttcactcataaagctggtatccatgctaaagctatcttggccaatccatctacttatgaaattttgagtccaagtgatttcggtttaaccagatatattcactttgctaatagattgactggttggaatgccatcaaatcaagagttgatcagttgaacttgcatttaactgatgaacagtgtaaagaagtcactaacaagattaagaaattgggtgatgtcagacaattgaatatcgatgatgtggattcaatcatcaaagatttccatgctgatatgtcaacaccacttttgaaatcaaatggagcggaagaagaaccagatgtaaaaaaacaaaaagtttaa

SEQ ID NO: 6794 - protein, 428 aa, Candida albicans SC5314
MVDGYKEVSESFDRSKIQHNPYGPNPGDFLSNVGNFQLIESTLREGEQFANAFFSTETKIEIAKALDDFGVDYIELTSPVASEQSRKDCEAICKLGLKAKILTHIRCHMDDARVAVETGVDGVDVVIGTSQFLRQYSHGKDMNYIAQSAIEVIEFVKSKGIEIRFSSEDSFRSDLVDLLNIYRTVDKIGVNRVGIADTVGCANPRQVYELVRTLKSVVKCDIECHFHNDTGCAIANAYTALEGGARLIDVSVLGIGERNGITPLGGLMARMIAADREYVLSKYKVHKLRDIENLVAEAVQVNIPFNNPITGFCAFTHKAGIHAKAILANPSTYEILSPSDFGLTRYIHFANRLTGWNAIKSRVDQLNLHLTDEQCKEVTNKIKKLGDVRQLNIDDVDSIIKDFHADMSTPLLKSNGAEEEPDVKKQKV

SEQ ID NO: 6795 - DNA, 1344 bp, Ustilago maydis 521
  CDS (1)..(1344)
atgtgcgatcactctgagcctactcctatccagcacgtcaacggcactgcgcccgacacccatgtcgccatcgacacctcggctcccaacacgaacggcagcgtcgccaacggcggcgtcgtcgccagagacaatggtaatgcgggctcagtgcagcctttcaactcgcgctactcggactttttgagcaacgtctccaacttcaagatcatcgaatccacgctgcgtgagggcgagcagtttgcaaatgccttctttgacacagagaccaagatcaagatcgccaaggcactcgacaagtttggtgttgactgcatcgagctcacctcgcccgccgcttccgagcagtcgcgcaaggactgcgaggccatctgcaagctcggtctcaaggccaaggttatcactcacatccgatgtcacatggacgatgccaggatcgccgtcgagacgggtgtcgacggtgttgacgtcgtcatgggcacctccaagtttctccgcgagttttcgcacggcaaagacatgacctacattaccaagaccgccatcgaggtcattcagtttgtcaagagcaagggcatcgagattcgcttctccaccgaagactcgttccgttccgatctcgtcgacctgctcagcatctaccaggccgtcgacaaggtgggcgtcaaccgtgttggtatcgccgacaccgttggtgttgccaacccaagacaggtgtacgacctcgtgcgcacactgcgtggcgtcgtcggctgcgacatcgagtgccacttccacaacgacacgggttgcgccatcgccaacgcctacaccgcactcgaggccggcgccacccacgtcgatacctcggtactcggcattggcgagcgaaatggcatcccttcgctcggcggctttatcgcgcgcatgtacaccgccgatcgcgagtacgtgatgagcaagtacaacctcaaggcgttgcgcgaggtcgagaacctcgtcgccgaagccgtccaaatccaggtgccattcaacaactacgtcaccggctactgcgcctttacgcacaaggcgggcatccacgccaaggcgattctggccaacccttcgacatacgagatcatccgtcccgaagactttggtatgagccgatacgtctcgatcggccaccgtctcaccggctggaacgcggtcaagtcaaggtgcgagcagctcgaacttagcctcaccgaggagcaggtcaagcaggtcaccgccaagatcaagcagttggccgacgtgcgcgaacagactatggaggacgtcgattcgatcttgaggaattacgcgcgcgccatcgagaacggttcctcagtcgccgcctga

SEQ ID NO: 6796 - protein, 447 aa, Ustilago maydis 521
MCDHSEPTPIQHVNGTAPDTHVAIDTSAPNTNGSVANGGVVARDNGNAGSVQPFNSRYSDFLSNVSNFKIIESTLREGEQFANAFFDTETKIKIAKALDKFGVDCIELTSPAASEQSRKDCEAICKLGLKAKVITHIRCHMDDARIAVETGVDGVDVVMGTSKFLREFSHGKDMTYITKTAIEVIQFVKSKGIEIRFSTEDSFRSDLVDLLSIYQAVDKVGVNRVGIADTVGVANPRQVYDLVRTLRGVVGCDIECHFHNDTGCAIANAYTALEAGATHVDTSVLGIGERNGIPSLGGFIARMYTADREYVMSKYNLKALREVENLVAEAVQIQVPFNNYVTGYCAFTHKAGIHAKAILANPSTYEIIRPEDFGMSRYVSIGHRLTGWNAVKSRCEQLELSLTEEQVKQVTAKIKQLADVREQTMEDVDSILRNYARAIENGSSVAA

SEQ ID NO: 6797 - DNA, 1476 bp, Cryptococcus neoformans var. neoformans B-3501A
  CDS (1)..(1476)
atgtgccctcctgcagacgagcccatcaacgccggcgctgaccaggacatggtcgccatcgaaaccaacaccccccacatctccacgtcctccgccaaccaagtgaacggcaccaccggtaccgctgaggcgcagccccctgctgtcaagacccacaagggcttgtatggtcgtgcttccgacttcttgagcaacacttccaactggaagatcattgagtccacattgcgagaaggagagcagtttgctaatgctttcttcaccctcgagaccaagatcaagattgccaagatgcttgacgagtttggtgtcgagtacattgagcttacttcccctgctgcctctcccgagtcccgtgcccactgtgaggccatctgcaaccttggtttgaagaggaccaagattttaacccacattcgatgccacatggacgatgctcgattggctgttgagactggtgtcgacggcgttgacgttgtcatcggtacttcttctttcttgagggagcactctcacggtaaggacatgacctggattaccaagaccgctatcgaggttattgagttcgtcaagtccaagggtattgagatccgattctcctctgaggactctttccgatccgaactcgtcgatttgctctctatctaccgaaccgtcgacaagattggtgtcaaccgtgttggtgttgccgatactgttggttgtgccgacgctcgacaggtttacgaactggtgaggacattgcgaggtgtggtcagctgtgacattgagactcacttccacaacgacaccggttgtgctatcgccaacgcctatgccgccctcgaagccggtgctacccacgtcgacacatctatcctcggtattggtgagcgaaatggtatcacccctcttggtggtctcattgctcgaatgatggttgccgaccctgagtacgtcaagagcaagtacaacctcactatgcttcgagagctcgaaaacttcgttgccgaagccgttgaggttcaggttcctttcaacaactacatcactggtttctgtgccttcacccacaaggccggtatccacgccaaggccatccttgccaacccctccacctacgagatcctcaaccctgccgacttcgggatgacccgatacgtctctatcggtcaccgattgactggttggaacgccgttaaaagccgggttgagcaactcaacctcaagcttaatgacgaacaggtcaaggatgccactgccaagatcaaggagctcgccgacgttcgaacacagtctatggaggacgttgacatgatcctccgtatttaccacactggtatccagagtggtgacctcaaggtcggccagtccgccgtcctcgaccgattgctcgagaagcacatgccctcaagagataactctcccagcggcaggtcctccaacgctgacggtactcccgccaagcgtcaacgagtcggagagccttccgcctaa

SEQ ID NO: 6798 - protein, 491 aa, Cryptococcus neoformans var. neoformans B-3501A
MCPPADEPINAGADQDMVAIETNTPHISTSSANQVNGTTGTAEAQPPAVKTHKGLYGRASDFLSNTSNWKIIESTLREGEQFANAFFTLETKIKIAKMLDEFGVEYIELTSPAASPESRAHCEAICNLGLKRTKILTHIRCHMDDARLAVETGVDGVDVVIGTSSFLREHSHGKDMTWITKTAIEVIEFVKSKGIEIRFSSEDSFRSELVDLLSIYRTVDKIGVNRVGVADTVGCADARQVYELVRTLRGVVSCDIETHFHNDTGCAIANAYAALEAGATHVDTSILGIGERNGITPLGGLIARMMVADPEYVKSKYNLTMLRELENFVAEAVEVQVPFNNYITGFCAFTHKAGIHAKAILANPSTYEILNPADFGMTRYVSIGHRLTGWNAVKSRVEQLNLKLNDEQVKDATAKIKELADVRTQSMEDVDMILRIYHTGIQSGDLKVGQSAVLDRLLEKHMPSRDNSPSGRSSNADGTPAKRQRVGEPSA

SEQ ID NO: 6799 - DNA, 1623 bp, Prochlorococcus marinus str. MIT 9303
  CDS (1)..(1623): transl_table=11
atggccaaggatccaggccgcgttttgatttttgacaccaccctcagggatggggagcagtcccctggtgcaagtctcaatctcgaggaaaagctggctattgcccagcaactcgctcgtttgggtgtggatgtgattgaagcgggctttccttttgccagccagggtgatttttctgccgtgcaacgtattgcccagcaggttggcggggatgaaggcccaatcatttgtggcttggctagggcttcgcgtgctgatatcaaggcttgtgctgatgccgttgccccagcccctcgacgacgaattcacacattcattgccacgagtgatattcacttggagcacaagctgcgtaaatctcgggcggaggttctggcgatcgttccagagatggtcgcctacgcccgctcactcgttgatgatgttgagttctcctgtgaggatgccgctcgaagcgaccctgagtttctttatgaggtgatcgaggctgcgattgctgcgggggcgggcaccatcaatatccccgacacagttggttttacaactccctcggagttcggggcgttgattgctggtatcgattgccatgttccaaatatgaatgaggccattctttctgttcatggtcacaacgatctcggactggctgtagccaattttttagaagctgtgaaaagtggagcccggcagtttgaatgcacgatcaacggcattggagagcgtgcagggaatgctgcgcttgaggagctggtgatggctttgtatgtgaggcggcgttatttcaatcccttctttgggcgtgaatctgatagccctactcctctaacggccgttcgcacggaggaaatcaccaagacatctcgattggtctcaaatctcaccggcatggtggtgcagcccaataaggcgattgtcggcagcaatgctttcgcccatgagtcaggtattcatcaagatggtgtgcttaaaaatcgtcttacttatgaaattgttgatgcccgtacggttgggctgaccgacaatcggatctcgctgggcaagctaagtggtcgcagtgccgtccgagctcgccttgaggagctcggttacgacttgactcgggaggatcttgacgaagcctttgcacgatttaaggatctggccgatcgcaagcgcgatataaccgatcgagatcttgaggccattgtcagcgaacaggtccagcagcctgaagctcgttttcagttacgactggtgcaagtcagttgcggtagcagtcttaggcctacggctactgtcattcttgcgcaagaggatggacaggagcagactgccgctgcagtgggcaccggtccagtagatgctgtctgtcgtgcattgaatgctctggctggcgaacctaatgagctgatcgagttctcggttaagtcggtaacggaagggattgatgcgatgggtgaagtcacgattcggctacgtcgggatgggcagcttttctcaggtcattccgctgacactgatgtggtggttgctgcagctcaagcatttgtgaatgcgcttaatcggctggtggcaggttgcggtcgccagtctcttcatccccaacatgatgctgtgctagctgatcgacggccaggcatctga

SEQ ID NO: 6800 - protein, 540 aa, Prochlorococcus marinus str. MIT 9303
MAKDPGRVLIFDTTLRDGEQSPGASLNLEEKLAIAQQLARLGVDVIEAGFPFASQGDFSAVQRIAQQVGGDEGPIICGLARASRADIKACADAVAPAPRRRIHTFIATSDIHLEHKLRKSRAEVLAIVPEMVAYARSLVDDVEFSCEDAARSDPEFLYEVIEAAIAAGAGTINIPDTVGFTTPSEFGALIAGIDCHVPNMNEAILSVHGHNDLGLAVANFLEAVKSGARQFECTINGIGERAGNAALEELVMALYVRRRYFNPFFGRESDSPTPLTAVRTEEITKTSRLVSNLTGMVVQPNKAIVGSNAFAHESGIHQDGVLKNRLTYEIVDARTVGLTDNRISLGKLSGRSAVRARLEELGYDLTREDLDEAFARFKDLADRKRDITDRDLEAIVSEQVQQPEARFQLRLVQVSCGSSLRPTATVILAQEDGQEQTAAAVGTGPVDAVCRALNALAGEPNELIEFSVKSVTEGIDAMGEVTIRLRRDGQLFSGHSADTDVVVAAAQAFVNALNRLVAGCGRQSLHPQHDAVLADRRPGI

SEQ ID NO: 6801 - DNA, 1194 bp, Clostridium difficile 630
  CDS (1)..(1194): transl_table=11
atgtgcgttatatcaaaagatagagcaaaggaaataaaaatagtagatactactttaagagatggagagcaaacagctggggttgtatttgcaaatagagaaaaaataatgattgctgaaatgttaagtgacctaggtgttgaccaaattgaagttggtatacctactatgggtggagatgaaaaaaatgtaataaagcacatatgtagtagaaatttaaaatcagatataatggcttggaatagagcagtaataaaagatgttgaagaatctatttcttgtggtgttgatgcagtagctatatcaatatcagtatctgacattcatatagaaaataaattgagaacttctagaggctgggttttagaaaatatggctaaaacagttgaatttgcaaagaaaaatggattatatgtttcagtaaatggagaagatgcttcaagagcagatatagacttcttaactgaatttataaatgttggaaaacaagcaggggcagatagatttagatactgtgatacagtaggagttatgaatcctttttctataaagaatgcaatagaaactctttatgaaagaactaattttgatatagaaatgcatacacataatgactttgggatggcaactgcaaatgcacttgcaggaatagcagcaggagcaaattatgttggtgttacagtaaatggattaggtgaaagagcaggaaatgcagcattagaagaagttttaatggcacttaagtgtgtttataaatgtgatttaaataatatagatactagaaaatttagaggaatatgtgagtatgtagcacaggcatcaggaagaatacttcctacatggaaaccagtagttggggataatatgtttatacatgaatctggtatacatgcagatggagctttaaaagacccacataactatgaaccatttgacccaagtgaagtaaatcttgaaagaaaaatagtaataggtaaacattcaggaagagctgcagttgtaaataagttgagtgaatatgaaatgtatatttctccagaaaacgctaccaagctattaaatgctataagagctacatctataagattaaaaagaagtttaatggataaagaaattcttcaattatattgtgatatactagcacatgagaaaggcacaacagaagaagaagcagttagaggttcatatatttaa

SEQ ID NO: 6802 - protein, 397 aa, Clostridium difficile 630
MCVISKDRAKEIKIVDTTLRDGEQTAGVVFANREKIMIAEMLSDLGVDQIEVGIPTMGGDEKNVIKHICSRNLKSDIMAWNRAVIKDVEESISCGVDAVAISISVSDIHIENKLRTSRGWVLENMAKTVEFAKKNGLYVSVNGEDASRADIDFLTEFINVGKQAGADRFRYCDTVGVMNPFSIKNAIETLYERTNFDIEMHTHNDFGMATANALAGIAAGANYVGVTVNGLGERAGNAALEEVLMALKCVYKCDLNNIDTRKFRGICEYVAQASGRILPTWKPVVGDNMFIHESGIHADGALKDPHNYEPFDPSEVNLERKIVIGKHSGRAAVVNKLSEYEMYISPENATKLLNAIRATSIRLKRSLMDKEILQLYCDILAHEKGTTEEEAVRGSYI

SEQ ID NO: 6803 - DNA, 1137 bp, Burkholderia vietnamiensis G4
  CDS (1)..(1137): transl_table=11
atgtccattccgatcatcaacgacacgacactgcgcgacggcgaacagaccgccggcgtcgcgttcaccgtcgaggagaaatgcgcgatcgcgaccgcgttgtcgaacgccggcgtgcccgaactcgaaatcggcatcccgtcgatgggcgccgacgagattgcggacatccgctcgatcgtcgacctgaatctcgacgcgagcgtcatggtatggggacgcctgacgccgggcgacctcgccgcggcgctgcgctgccggcccgacatcatccacctgtccgtgccggtgtcggacattcatctgcaatacaagctgcgccagccgcgcgcctgggtgttcgcgcagatcaggcgcgtgatcggcgaggccgtgcgcagcgatctgaagatctcgctcggcgccgaggacgcgtcgcgcgcggacccggcgttcctcgccgacgtcgcgcggctcgcgcagcaatgcggcgcgcagcgcatccgcttcgccgacacgctcggcgtgctcgatccgttctcgacctacgaagccgtcgcgcgcctgcgcgacgccatcgacatcgagatcgagatgcacgcgcacaacgatctcgggctcgccaccgccaacacgctcgcggcgctgcgggctggcgcgacgcatgcgaacacgacggtcaacggcctcggcgagcgcgcgggcaacgcggcgctcgaggaggtcgtgatgtgctcgcgccatctgctcggccgcgacaccggcgtcgacaccaccgcgctcgtcggcatttcgcggctcgtcgagcatgcgtccgggcggcaggtcgcgctcaacaagagcatcgtcggcggcggcgtgttcacgcacgagtcgggcatccacaccgacggcctcgcgaagaatccgacgacctacgagagcttcgatccggccgagctcggccgcgcgcgctcgctcgtgctcggcaagcattccggctcgcacggcgtgcgccatgcgtacgaggcgctcgggctgccggtcgccgaccagctcgtgccgctgctgctcgcgcgcatccgccagcatgcgacccagacgaagcaggcgccgaacgcggccgatctgtaccggttcctggtcgagacgcgcgaactaatcgaggaatggtcatga

SEQ ID NO: 6804 - protein, 378 aa, Burkholderia vietnamiensis G4
MSIPIINDTTLRDGEQTAGVAFTVEEKCAIATALSNAGVPELEIGIPSMGADEIADIRSIVDLNLDASVMVWGRLTPGDLAAALRCRPDIIHLSVPVSDIHLQYKLRQPRAWVFAQIRRVIGEAVRSDLKISLGAEDASRADPAFLADVARLAQQCGAQRIRFADTLGVLDPFSTYEAVARLRDAIDIEIEMHAHNDLGLATANTLAALRAGATHANTTVNGLGERAGNAALEEVVMCSRHLLGRDTGVDTTALVGISRLVEHASGRQVALNKSIVGGGVFTHESGIHTDGLAKNPTTYESFDPAELGRARSLVLGKHSGSHGVRHAYEALGLPVADQLVPLLLARIRQHATQTKQAPNAADLYRFLVETRELIEEWS

SEQ ID NO: 6805 - DNA, 1545 bp, Burkholderia vietnamiensis G4
  CDS (1)..(1545): transl_table=11
atgacagacaagctgatcattttcgatacgacgttgcgtgacggtgaacaatcgcccggcgcgtcgatgacgaaggaagagaaaatccgcatcgcgaagcacctcgagcggatgaaggtcgacgtgatcgaggcaggtttcgcggccagctcgaacggcgacttcgacgcgatccacacgatcgccgggctcgtgaaggacagcacgatctgctcgctcgcgcgcgccaacgacaaggacatccagcgcgcagccgatgcactgaagccggccagcagcgcgcggatccacacgttcatcgcgacgtcgccgctgcacatggaaaagaagctgcgcatgacgccggaccaggtgttcgagcaggcgcggctcgcggtgcgctttgcacgcaagttcaccgacaacgtcgagttctcgccggaagacggcagccgctcggatctcgacttcctgtgccgcgtgctggaagcggtgatcgccgaaggcgcgacgacgatcaacatcgccgatacggtcggctacggcgtgccggagctttacggcaacctggtgaagacgctgcgcgaacgcattccgaactcggacaaggcgatcttctccgtgcattgccacaacgacctcgggatggcggtcgcgaactcgctcgcgggcgtgaagatcggcggggcgcgtcaggtcgaatgcacgatcaacggtctcggcgagcgcgcgggcaatacgtcgctcgaagaaatcgtgatggccgtgaagacgcgcaaggactacttcggcctcgacgtcggcatcgacacgacgcagatcgtgccgacctcgaagctcgtgtcgcagatcaccggtttcgtcgtgcagccgaacaaggccgtggtcggggcgaacgcgttcgcgcacgcttccggcatccaccaggacggcgtgctgaaggcgcgcgacacctacgagatcatgcgcgcggaagacgtgggctggaccgcgaacaagatcgtgctcggcaagctgtcgggccgcaacgcgttcaagcagcggctgcaggagctcggcgtgtcgctcgacagcgaagccgaactgaacgccgcgttcatgcgcttcaaggatctcgccgaccgcaaggccgagatcttcgacgaggacatcatcgcgatcgtctccgaagaatcggcgctcgcgcaggagcaggagcacgtcaagttcgtgtcgctgtcgcagcattcggaaaccggcgagcagccgcaagcgaaggtcgtgttcgcggtcgaaggcagcgaggtgaccggcgaggcgcgcggcaacggcccggtcgatgcgacgttcaacgcgatcgagggcgaagtcggcagcggttccgagctgctgctgtattcggtgaacgcgatcacgaccggcacgcaggcgcagggcgaagtgacggtgcggctgtcgaagaacgggcgcatcgtgaacggcgtcggcaccgacccggacatcgtcgcggcttccgcgaaggcgtacatcgccgcgttgaacaagctgcactcgaaggacgacaagctcaacccgcaacgcgcataa

SEQ ID NO: 6806 - protein, 514 aa, Burkholderia vietnamiensis G4
MTDKLIIFDTTLRDGEQSPGASMTKEEKIRIAKHLERMKVDVIEAGFAASSNGDFDAIHTIAGLVKDSTICSLARANDKDIQRAADALKPASSARIHTFIATSPLHMEKKLRMTPDQVFEQARLAVRFARKFTDNVEFSPEDGSRSDLDFLCRVLEAVIAEGATTINIADTVGYGVPELYGNLVKTLRERIPNSDKAIFSVHCHNDLGMAVANSLAGVKIGGARQVECTINGLGERAGNTSLEEIVMAVKTRKDYFGLDVGIDTTQIVPTSKLVSQITGFVVQPNKAVVGANAFAHASGIHQDGVLKARDTYEIMRAEDVGWTANKIVLGKLSGRNAFKQRLQELGVSLDSEAELNAAFMRFKDLADRKAEIFDEDIIAIVSEESALAQEQEHVKFVSLSQHSETGEQPQAKVVFAVEGSEVTGEARGNGPVDATFNAIEGEVGSGSELLLYSVNAITTGTQAQGEVTVRLSKNGRIVNGVGTDPDIVAASAKAYIAALNKLHSKDDKLNPQRA

SEQ ID NO: 6807 - DNA, 1140 bp, Bradyrhizobium sp. ORS278
  CDS (1)..(1140): transl_table=11
atgcgccgggttatcctgaacgacaccacgcttcgcgacggcgagcaggccccgggcgtcgctttcgcccttaccgagaaggtcgcgatcgcccgcgcgctggcgcgggccggcgttcccgagatcgaagccggcacgcccgcgatgggggccgacgagatcgccgcgatcagggcaatcgtcgaggccggtctgccggcgaccatcatcggctggtgccggatgcgcgaggcggatgtcgatgccgccgtcgcagccggtgtgtcgatggtcaatgtctccattccgacgtcggatgttcagatcgcagccaagctcggcggtggccgcagcgtcgcgctggaattgctcaagcgcgttgtcagctatgcaaagagccggggattggacgttgccgtcggcggcgaggattcctcgcgcgcggacgtcggcttcctggcggaagtgattgcgaccgcaaaggcgctcggcgcgcggcgcttccgtgtcgccgataccctgagcgtgctcgatcccgacgcgacatcggcgctggtcggagccttgcgcgcgacgaccgacctggagatcgaatttcacggccacgatgatctcggccttgccaccgccaacacgctcgccgccgtgaaggccggcgcgacgcatgcgtcggtcacggtgatcggcctcggcgagcgcgccggcaatgcgccgctggaggaggtggcggtcgcgttgcggcagctctaccgtcgcgagaccggcatcgtgctcgccgagctcgatcatgtcgccaatgtcgtcgcagccgctgcggcgcgcgcgatcccgctcaacaaggcgatcgttggcgagcatgtcttcacccacgagtccggtattcacgtcgatggcctgctcaaggatcagcgcacctaccaggcgctcgatcccatgctgttcggccgttccaaccggatcgtgatcggcaagcattccggtctctcggcgatcacctcgctgctgtccgacctgcgtctgccggcgagcgccgaccaggcgcaacgcatcctcgcgcgcgtgcgcaagcatgcggtcgcgcacaagggtcctgtgccgaaggaagccgttgccgccatctggcgcgaagtttgtgatcacccgcatgcgagctttgcctga

SEQ ID NO: 6808 - protein, 379 aa, Bradyrhizobium sp. ORS278
MRRVILNDTTLRDGEQAPGVAFALTEKVAIARALARAGVPEIEAGTPAMGADEIAAIRAIVEAGLPATIIGWCRMREADVDAAVAAGVSMVNVSIPTSDVQIAAKLGGGRSVALELLKRVVSYAKSRGLDVAVGGEDSSRADVGFLAEVIATAKALGARRFRVADTLSVLDPDATSALVGALRATTDLEIEFHGHDDLGLATANTLAAVKAGATHASVTVIGLGERAGNAPLEEVAVALRQLYRRETGIVLAELDHVANVVAAAAARAIPLNKAIVGEHVFTHESGIHVDGLLKDQRTYQALDPMLFGRSNRIVIGKHSGLSAITSLLSDLRLPASADQAQRILARVRKHAVAHKGPVPKEAVAAIWREVCDHPHASFA

SEQ ID NO: 6809 - DNA, 1623 bp, Synechococcus sp. WH 7803
  CDS (1)..(1623): transl_table=11
atggcccatgatccaggccgcgttctgatcttcgacaccaccctcagggatggtgagcagtcgccgggcgccagcctcaaccttgaagaaaagctggccattgcccagcagctggcgcgccttggcgtcgacgtgatcgaagcgggctttccttttgccagccctggcgacttcaatgccgttcagcgcatcgcccagcaggtgggtggagagcaggggccgatcatctgcggcctggcccgcgcctcccgcggggatatcaaggcctgcgctgatgcggtggcccctgcaccgcgccgccgcattcacaccttcatcgccacgagcgacattcacctcgagcacaaactgcgcaaaagccgccaggaggtgttggcgatcgtgcccgagatggtggcctacgcccgctctctggtcgacgacgtggagttctcctgcgaggacgccggtcgcagtgatcccgagttcctttacgccgtgatcgaagcggccatcaacgctggtgccagcacgatcaacatccccgacacggtggggtacaccacaccggccgagttcggcgccttgatcgctgggatcgaccagcacgtgcccaacatcagtgaggcggtgctgtcggtgcatggccacaacgacctaggcctggccgtggccaacttcctggaggctgtgaagaacggggcccgccagttggagtgcaccatcaatggcatcggcgaacgcgccggtaacgcagcgctcgaagagctggtgatggcgttgcacgtccgccgccgctacttcaatccctttttcggccgagcggaagactcccccacccccttaacaggtgtgcgcaccgaggagatcaccaaaacgtcgcgtctggtttccaacctcaccggcatggtggttcagcccaacaaggcgattgtgggtgcgaatgcctttgcccatgaatcaggcattcaccaggacggcgttctcaaaaaccgcctcacctacgagatcgtcgatgcccgcacggttggtctcaccgataaccgcatctcccttggcaagctgagcggccgcagcgcggtgcgtgcccgtctcgaggaactcggctacgacctcagccgcgaagacctcgacgatgccttcgcccgcttcaaggagttggccgatcgcaagcgcgacatcaccgatcgcgaccttgaggcgatcgtgagcgagcaggtgcaacaacccgatgcccgttatcagctcaagttggtgcaggtgagctgcggcagcagtctgcagcccacagccaccgtgaccctgctcgatgaggagggccaagaacagagcgaggctgcgatcggcacaggccctgtggatgcggtgtgccgtgccctcaatgccctggccggggagcccaacgaactggtggagttttcggtgaagtccgtcaccgagggcatcgatgccatgggcgaggtcacgatccggctgcggcgtgacggtcagctcttttccggccatgctgccgacaccgatgtggtggtcgccgccgctcaggcctttgtgaatgccctcaatcgcctggtggccgggtctttgaacccaacccttcatccccagcgggatgccacgcctttggacgccagcccgaccctctga

SEQ ID NO: 6810 - protein, 540 aa, Synechococcus sp. WH 7803
MAHDPGRVLIFDTTLRDGEQSPGASLNLEEKLAIAQQLARLGVDVIEAGFPFASPGDFNAVQRIAQQVGGEQGPIICGLARASRGDIKACADAVAPAPRRRIHTFIATSDIHLEHKLRKSRQEVLAIVPEMVAYARSLVDDVEFSCEDAGRSDPEFLYAVIEAAINAGASTINIPDTVGYTTPAEFGALIAGIDQHVPNISEAVLSVHGHNDLGLAVANFLEAVKNGARQLECTINGIGERAGNAALEELVMALHVRRRYFNPFFGRAEDSPTPLTGVRTEEITKTSRLVSNLTGMVVQPNKAIVGANAFAHESGIHQDGVLKNRLTYEIVDARTVGLTDNRISLGKLSGRSAVRARLEELGYDLSREDLDDAFARFKELADRKRDITDRDLEAIVSEQVQQPDARYQLKLVQVSCGSSLQPTATVTLLDEEGQEQSEAAIGTGPVDAVCRALNALAGEPNELVEFSVKSVTEGIDAMGEVTIRLRRDGQLFSGHAADTDVVVAAAQAFVNALNRLVAGSLNPTLHPQRDATPLDASPTL

SEQ ID NO: 6811 - DNA, 1575 bp, Thermus thermophilus HB27
  CDS (1)..(1575): transl_table=11
gtggtagaaatcctggacaccaccttaagggacggcacccaaggggagggggtaagcctctccgtggacgacaaggtggccatcgcgaggcgccttgccgccttcgggatccacctcattgagggggggtggcccggctccaaccccaaggacgccgagttcttccagcgcatgaggggggtggacctgggggcggcgaggcttgccgccttcggggccacgaggcgaaagggcctcgcccccgaggaagacccctcggtcctcgcccttttggaggcggagacccccgtggtggtcctcttcggcaaaagctggaccctgcacgttttggaggctttggagacctccttggaggagaacctccgcatgattgaggagacggtggccttcttcgcccggaggggcaggcgggtggtctacgacgccgagcacttctttgacggctacaaggaggatcccgcttacgccctcgccaccctcgaggccgccttcaggggcggggccgacaccctggtcctttgcgacaccaacggggggagcctccccgaggaggtctacgccatcaccaaggcggtggtggagcggtttccgggggtccgggtgggcatccacccccacaacgacgccgacctcgccgtggccaacgccctcgcggcggtgcgggccggggccacccacgtccagggcaccatcaacggctacggggaaaggtgcggcaacctcaacctcacgagcttcctccccaccctggtcttcaagtacgggatccccgccatctccccggaaaagctgagggagctcagggaggtttcccacttcgtggacgaaagggccaacctcacccccaaccgccgcgccccctacgtgggggaggcggccttcgcccacaaggccggggtgcacgtctccgccgtcctcaagaacccccgcacctacgagcacatccccccggagtgggtggggaaccagcggcgctttctggtctcggacgtctcgggccgctccaacctcctcgccaagctccaggagctcggggtggacctaagcaaggaggaggccaggcgccttctggaggaggtcaaggccctggagtacgagggctacgcctttgagggggcggaggcgagcttctacctcctcgcccaccgcctgaagggcgggagccttcccttcagcgtggagggctttagcgtcttcgtccacggaaggggcctttccaccgcctgggccgaggccacggtgcgggttagggtgggggagagcctccagcacaccgccgcggaaagccccttcgggcccgtctccgccctggatagggccttccgcaaggccgtgttgcagttctatccggagctttccgaggtggagctcacggactacaaggtgcggatcctctccggccaggaggcggggacgaactccggggtgcgggtcatggtggagatgaagcggggggaggagcgcttcgccaccgtgggggcgagcgagaacatcctcgaggcctccctcaaggccctcaccgacgggtacgcctacgccctcctctacccggtggctacgcccaggggagcctga

SEQ ID NO: 6812 - protein, 524 aa, Thermus thermophilus HB27
MVEILDTTLRDGTQGEGVSLSVDDKVAIARRLAAFGIHLIEGGWPGSNPKDAEFFQRMRGVDLGAARLAAFGATRRKGLAPEEDPSVLALLEAETPVVVLFGKSWTLHVLEALETSLEENLRMIEETVAFFARRGRRVVYDAEHFFDGYKEDPAYALATLEAAFRGGADTLVLCDTNGGSLPEEVYAITKAVVERFPGVRVGIHPHNDADLAVANALAAVRAGATHVQGTINGYGERCGNLNLTSFLPTLVFKYGIPAISPEKLRELREVSHFVDERANLTPNRRAPYVGEAAFAHKAGVHVSAVLKNPRTYEHIPPEWVGNQRRFLVSDVSGRSNLLAKLQELGVDLSKEEARRLLEEVKALEYEGYAFEGAEASFYLLAHRLKGGSLPFSVEGFSVFVHGRGLSTAWAEATVRVRVGESLQHTAAESPFGPVSALDRAFRKAVLQFYPELSEVELTDYKVRILSGQEAGTNSGVRVMVEMKRGEERFATVGASENILEASLKALTDGYAYALLYPVATPRGA

SEQ ID NO: 6813 - DNA, 1563 bp, Thermus thermophilus HB27
  CDS (1)..(1563): transl_table=11
atggagaaggaacggcacatccggatctttgacaccacgctcagggacggggagcaaagcccaggggtggccctctccctggaccagaagctggagatcgcccaggccctcgcccagctcaacgtggacatcattgaggcgggcttccccgtatcggggcccatggagtttgaggcggtgcgccgcatcgccaccgaggtcaagggccccatcatcgccgccctcgcccgcacccacaccctggacattgaccaggcggccaaggccctggagaaggcggagaagcccaggatccacgtcttcacctccgcctccaaggtccacctgcagtacatgctgaggaagacggaggaggaggtcctggagatggcggatagaatggtccgctacgccaggaggtacgtggacgacgtggagttctccgcccaggacgtgatgcgggcggactgggagttcgtcaagaggctttacgaggtggccattgaggccggggccaccaccatcaacatccccgacaccacgggctacggcacgccccaggagtacggggccctgatccgcaggatccgggacgaggtggtgcgggggcgggacgtgatcatctccacccacacccacgacgacctgggcatggccacggccaacgccctggcgggcgtggagaacggggcgggccagattgagtgcaccatcaacggcatcggggagcgggcggggaactgcgccctggaggaggtggtcatggccctctacgtccgccgggactggtacaaggcctacacgcggatcaacacccgggagatctaccgggtgagccgcctggtggagcgctacaccgggatgcccgtcccccccaacaaggccatcgtgggggacaacgccttcgcgcacgagtccggcatccaccaggacggggtcatcaagcaccgggccacctacgagatcatggacgccgagctcatcgggaggcggcccgccgtgctcgtcctcggcaagcactcgggccgggcggcttttaaaaaggccctcgaggacctgggctacaaggacctctccgaggaggaggtgaagaagctcttcgcccgcttcaaggagatcgccgagaagaaggggcccctttccgccgaggagctccaagccctggtggaaagcgagcgggagcccacctctcacttcttccagctggagcatgtccagtttttctcgggctccgggctcctgcccacggccacggtcaaggtgaagaccccggacggggagagggtggccacccacaccggggacggtcccgtggacgccgtgtacaaggccatccaggaggccatcggcctgaggccggaacttgagctctaccgggtggaggccatcacggggagcaccgaagccctgggccaggtcacggtgcgcctccggctcggcgagctccaggccgtgggggtgggggtctccccggacatcattgaggcgagcgccttggcctttttggacgccgccgggaagctcgcctcgggccgggccacccgccacccgccctccattgaggaggtccaccgtggggtctag

SEQ ID NO: 6814 - protein, 520 aa, Thermus thermophilus HB27
MEKERHIRIFDTTLRDGEQSPGVALSLDQKLEIAQALAQLNVDIIEAGFPVSGPMEFEAVRRIATEVKGPIIAALARTHTLDIDQAAKALEKAEKPRIHVFTSASKVHLQYMLRKTEEEVLEMADRMVRYARRYVDDVEFSAQDVMRADWEFVKRLYEVAIEAGATTINIPDTTGYGTPQEYGALIRRIRDEVVRGRDVIISTHTHDDLGMATANALAGVENGAGQIECTINGIGERAGNCALEEVVMALYVRRDWYKAYTRINTREIYRVSRLVERYTGMPVPPNKAIVGDNAFAHESGIHQDGVIKHRATYEIMDAELIGRRPAVLVLGKHSGRAAFKKALEDLGYKDLSEEEVKKLFARFKEIAEKKGPLSAEELQALVESEREPTSHFFQLEHVQFFSGSGLLPTATVKVKTPDGERVATHTGDGPVDAVYKAIQEAIGLRPELELYRVEAITGSTEALGQVTVRLRLGELQAVGVGVSPDIIEASALAFLDAAGKLASGRATRHPPSIEEVHRGV

SEQ ID NO: 6815 - DNA, 1128 bp, Picrophilus torridus DSM 9790
  CDS (1)..(1128): transl_table=11
atgataggcttgcttgacagtacacttagagagggagagcagacccctggcgtttcattttccatggatgcccgggtggaaatagccagggcgctttcagatgctggcgtttcaatgatagaggccggccatccggcagtttcagaaacagttttaaaatcaataaaaagcatcatggaattaaaatcatcaggaataataagatcaacgatagttgcacacagcagggccgtaagatcagatatagatgttgcggcctcgctcaatatcgacatgatagcaatattctatggaataagtgatcttcatttaaaatacaaaacgttaaagacccgcgaggatgcaataagaattatcgttgatagcattgattatgcaaggtcatatggtttaaatgtaagattcaccgcagaggatgccacaagaactgattataattatttactggatgttgcaagggccgccagggatgcaggtgcaaaaagaatatccatagcggacaccgttggaatattaaatcctgacacatcatataaactttttaaaatgataataaaagacgtaaaaaacgttgagtttgacatacatgcgcataacgatcttggaatggcagttgcaaacagcattgcggcatatcgtgcaggcgcgacaataatacattcaacggtaaacggtcttggtgaacgcagcggtataacgccaacacagataataggcccggcactaaaataccattacaatgaggccgttatcgatttaaaaaggctctacagcctgtcaaatcttgttgaaaaatacagtggggtaatggttccatacaattatccggtaacgggcaaaaatgcatttacacataaatcaggcgttcatatagccggtataataaacaaacctgaaacctatgaattcatggatccgtgtttatttggaaataaaaggtattatacaataagcagctacagtggcaggcatgcagtaattacaagattgcaggagcttggaatatcccttaacgatgagcatttaaaaatattaatgaagatgataaaaaataaaaatagggaattaaatgatgatgaattatatgccatggcagaatcaataaaaagatctgctgtttcaatgtaa

SEQ ID NO: 6816 - protein, 375 aa, Picrophilus torridus DSM 9790
MIGLLDSTLREGEQTPGVSFSMDARVEIARALSDAGVSMIEAGHPAVSETVLKSIKSIMELKSSGIIRSTIVAHSRAVRSDIDVAASLNIDMIAIFYGISDLHLKYKTLKTREDAIRIIVDSIDYARSYGLNVRFTAEDATRTDYNYLLDVARAARDAGAKRISIADTVGILNPDTSYKLFKMIIKDVKNVEFDIHAHNDLGMAVANSIAAYRAGATIIHSTVNGLGERSGITPTQIIGPALKYHYNEAVIDLKRLYSLSNLVEKYSGVMVPYNYPVTGKNAFTHKSGVHIAGIINKPETYEFMDPCLFGNKRYYTISSYSGRHAVITRLQELGISLNDEHLKILMKMIKNKNRELNDDELYAMAESIKRSAVSM

SEQ ID NO: 6817 - DNA, 1176 bp, Erwinia carotovora subsp. atroseptica SCRI1043
  CDS (1)..(1176): transl_table=11
atggcggatatcattatcaatgacactacgctgcgtgatggtgagcagagccccggcgtagcgtttcgcgccagcgaaaaactggcgattgccgaggcattagttgatgctggggtgaccgcgttggaagtgggcaccccggcgatgggagacgatgaacgggcgcgtattgcggttattcgccgccgcctgccggacacggtgctgatgacctggtgccggatgaatgcgctggaaatccggcaaagtgccgatctgggcatgaattgggtggatatctcggttcctgcatcggatcgattgcgcgaacagaagctgcgtcagccgcttaacgtcttattggcacagctttcctcgctgattgctcaggctcgtcagcaagggttacgtgtgtgtgtcggctgtgaagatgcatcgcgcgctagcgatgacaccttgcgtcagatagcgattgctgccgatgcagcaggggctgaacggctgcgctttgcggatacgctgggcgtgcttgacccgttctccaccttcgcccgtatcagtaccttgcggcaaaactggggcggtgagattgaaatgcatgcgcataacgatcttgggctggctacggccaatacgctggcagcgatagaggctggcgtttcccatgttaataccacggtgttgggtctgggggaacgggcaggtaatgctgcattggaaaccgtggcgttagcgctggaacgctgtctcgatcgtgacagtggcatccacttcgctcgtttgcccgcgctgtgccaactggtggcaagcgcggcacagcgcaccatcgacaagcagcagccgctggtgggggagcaggtatttactcacgaatccggcgtgcatgtcgcagctttgctaaacgacagccgcagttatcagggcatcgacccggcgctcatggggcgtgagttctgtttggttctaggtaagcattcgggacggcaagcggtggcggggattttcgcccgtttaggttttcagccgcaggcgagtgagacggaagcgctgttgcgcagcgtccgcgcttttgcggaaaactggaagcgtaatcctctggattatgaattgctggagatgtatcgcgaactgtgtggcagtgatgcggtgatggggagggcaaacgatggaatggttctaccagttacccggcgttga

SEQ ID NO: 6818 - protein, 391 aa, Erwinia carotovora subsp. atroseptica SCRI1043
MADIIINDTTLRDGEQSPGVAFRASEKLAIAEALVDAGVTALEVGTPAMGDDERARIAVIRRRLPDTVLMTWCRMNALEIRQSADLGMNWVDISVPASDRLREQKLRQPLNVLLAQLSSLIAQARQQGLRVCVGCEDASRASDDTLRQIAIAADAAGAERLRFADTLGVLDPFSTFARISTLRQNWGGEIEMHAHNDLGLATANTLAAIEAGVSHVNTTVLGLGERAGNAALETVALALERCLDRDSGIHFARLPALCQLVASAAQRTIDKQQPLVGEQVFTHESGVHVAALLNDSRSYQGIDPALMGREFCLVLGKHSGRQAVAGIFARLGFQPQASETEALLRSVRAFAENWKRNPLDYELLEMYRELCGSDAVMGRANDGMVLPVTRR

SEQ ID NO: 6819 - DNA, 1599 bp, Erwinia carotovora subsp. atroseptica SCRI1043
  CDS (1)..(1599): transl_table=11
atgagcgagcaagtcattatttttgataccacattacgcgatggtgaacaggctttacaggcgagtttgagtgtaaaagaaaaactgcaaattgccttcgctctggagcgtatgggcgttgatgtcatggaggttggctttccagtgtcatctcccggtgactttgaatccgttcaaaccattgcccgcaacatcaaaaatagtcgtgtgtgcggtctgactcgctgcgtagaaaaggatatcgatgttgccgcagaagcgctgcgtgtcgcagaagccttccgtatccacacctttatcgcgacctcaccgatgcacatcgccacgaagctgcgcagcacgctggacgaagtcattgaacgcgccatttacatgataaaacgcgcacgtaactatacagacgatgttgagttctcctgcgaagatgcgggccggacacccattccagacttgtgtcgcgtggttgaggccgcaatcaacgcgggcgctcgcacgattaatatcccggacaccgtcggctacaccatgccgcatgagttcggtaatatcatcgcctcgctgtaccaacatgttccgaatatcgataaagccatcatttctgttcacactcacgacgatctgggcttggcagtcggcaacgcaatggcagccgttcacgcaggagcgcgtcaggtagaaggtacgttgaacggtatcggtgaacgtgccggcaactgttcactggaagaagtgatcatggcgataaaaacccgccatgacatcttgaacgtccataccaacatcaaccatcaggaaatctaccgcaccagccaactggtcagccagatttgcaacatgcccatcccagctaacaaagcggtcgtgggtgccaacgctttcgcccactcttctggtattcatcaggatggcgtgctgaagaatcgtgaaaactacgaaatcatgacaccggaatccatcggcctgaaagaagtgcagttgaacctgacttcccgctctggtcgtgcggcggtgaaacaccgtatggaagagatgggctatcaggataacgattataatctggacgatctgtactctgccttcctgaaactggcggataaaaaaggccaggtatttgattacgatctggaagcgctggcctttatcagccgccagcaggaagaacctgagttctaccatctggattatttcagcgttcagtctggttctagcgtgatggcaacggcctcagtcaaactgatctgcggagaagaaacgcagtcagaagcggcgacgggtaatggcccagtggatgccgtttatcaggcgatcaaccgcatcacgggttatcaagtttcgctggtcaaataccaactgacggccaaaggtcaggggcgcgatgcgctgggtcaagttgatatcgtcgcggattatcaggggcgtcgtttccacggcgttggtctggcaacggatatcgttgaatcttccgcacaagcaatggtaaatgtattaaacaacatcaaacgtgctcagcaggtagaaaaagaaattcagcgtctgcagcagcacaataaccaacaacaaaacgatagcaaacaacaaaacagtcaggaaacagtgtga

SEQ ID NO: 6820 - protein, 532 aa, Erwinia carotovora subsp. atroseptica SCRI1043
MSEQVIIFDTTLRDGEQALQASLSVKEKLQIAFALERMGVDVMEVGFPVSSPGDFESVQTIARNIKNSRVCGLTRCVEKDIDVAAEALRVAEAFRIHTFIATSPMHIATKLRSTLDEVIERAIYMIKRARNYTDDVEFSCEDAGRTPIPDLCRVVEAAINAGARTINIPDTVGYTMPHEFGNIIASLYQHVPNIDKAIISVHTHDDLGLAVGNAMAAVHAGARQVEGTLNGIGERAGNCSLEEVIMAIKTRHDILNVHTNINHQEIYRTSQLVSQICNMPIPANKAVVGANAFAHSSGIHQDGVLKNRENYEIMTPESIGLKEVQLNLTSRSGRAAVKHRMEEMGYQDNDYNLDDLYSAFLKLADKKGQVFDYDLEALAFISRQQEEPEFYHLDYFSVQSGSSVMATASVKLICGEETQSEAATGNGPVDAVYQAINRITGYQVSLVKYQLTAKGQGRDALGQVDIVADYQGRRFHGVGLATDIVESSAQAMVNVLNNIKRAQQVEKEIQRLQQHNNQQQNDSKQQNSQETV

SEQ ID NO: 6821 - DNA, 1599 bp, Desulfotalea psychrophila LSv54
  CDS (1)..(1599): transl_table=11
atgatgaggaatttgatgcgaattgaaatatacgatacaaccctacgtgatggaacccaggctgaaaattttaatatttctgtcgacgataagttacgcatcgcccaggaacttgatactctgggtgttgattttatcgagggtggttggccggggtctaatccagtgaccatcgaattttttaatcgtattggagagatagatcttaagcatagcaagattgttgcctttggttctacccggcatataaaaaacaggccggaagaagatgcaaatctgcaggccctgcttgctgccaagacacctgccattatcatctttgggaaaagttgggatatccatgcaacggatgccctcaatattagcctggaagagaatctgcaaattatcgaggatagtcttgcctatctacgccctcatgtagagcatctcttctatgatgcggaacatttttttgatggtttcaagaataatgaagagtatgcccttaaaactgtggcaagtgccattgccggtggtgctgagcgcattgtcctctgtgataccaatggtggaaccctgccccatgaaatccctcccattatcaagcgggtaaaagagtttgttgccggtttgagtgagacagttggtcttggtattcatcctcacaatgattcagactcagcggtagccaatgctctgatggccgcatcctcgggggtagagcagattcaggggactatgaatggttttggtgagcgctgcggaaatgcgaatctgacctcaattatacccgccctagtctttaagatgggttttgactgtggggtaaaagagcacataagtcgactctatggttgttcacgtttggtgactgaactggccaaccttccccataaccactatcaaccctatgtgggtaagtctgcctttgctcataaggggggcatccatgtcagtgccgttaagcgtaatccacttacctatgagcatattgctccggagctggtgggcaatagcagaaggattttgctctcggatcaggcgggccgggccaatattctctttaaggccaaggagtggggaattcacattcgtccggatgatcctatcttgccggccattatcaaggagcttaaggaacttgagaaccttggctatcagtatgaggctgcagaggcaagttttgagcttattatgcgcaagcttttgggcttgaggagaaactatttttcctttcagggctttcgggtaacggataataagtatcgcatggataagccacctctcaccgaggcaactattcgtctctctgtggggggggtggaggtacatactgccgctggtggcgatggcccggtaaatgcccttgattctgcaatccgtaaggcgcttatacgattttatcccatcctggaagagatggagcttgtcgattttaaggtgcgggttctttcaggagagtatggaacagaggccaaggtacgtgttcttatcgagagccgtgatggtgaggagagttggggtacggtcggcgtttcggttaacataatagaggcaagttggcaggcccttatcgactctattacctataaattaatgaaagaagaaaagaagtag

SEQ ID NO: 6822 - protein, 532 aa, Desulfotalea psychrophila LSv54
MMRNLMRIEIYDTTLRDGTQAENFNISVDDKLRIAQELDTLGVDFIEGGWPGSNPVTIEFFNRIGEIDLKHSKIVAFGSTRHIKNRPEEDANLQALLAAKTPAIIIFGKSWDIHATDALNISLEENLQIIEDSLAYLRPHVEHLFYDAEHFFDGFKNNEEYALKTVASAIAGGAERIVLCDTNGGTLPHEIPPIIKRVKEFVAGLSETVGLGIHPHNDSDSAVANALMAASSGVEQIQGTMNGFGERCGNANLTSIIPALVFKMGFDCGVKEHISRLYGCSRLVTELANLPHNHYQPYVGKSAFAHKGGIHVSAVKRNPLTYEHIAPELVGNSRRILLSDQAGRANILFKAKEWGIHIRPDDPILPAIIKELKELENLGYQYEAAEASFELIMRKLLGLRRNYFSFQGFRVTDNKYRMDKPPLTEATIRLSVGGVEVHTAAGGDGPVNALDSAIRKALIRFYPILEEMELVDFKVRVLSGEYGTEAKVRVLIESRDGEESWGTVGVSVNIIEASWQALIDSITYKLMKEEKK

SEQ ID NO: 6823 - DNA, 1155 bp, Methylococcus capsulatus str. Bath
  CDS (1)..(1155): transl_table=11
atggttgcacagcgggtcaccatcaacgacaccacccttcgcgacggcgagcagaccgccggcgtcgctttcaccgccgaggaaaagctttccatagctcgtgcgctggctcgggccggcgtgccggaaatggaagtgggcattcccgtcatgggcgccgaggagcaggaggtgatccgggccatcgccggcctgggactatcggcccggctgatggtctggggtcggatgtgcgagcgggatctggcggcggccgccgattgcggcgccgatcgggtgaacctgtcgatcccggtatcggacatccatctccgccacaaggtgaaccggacccgcgaatgggtgttggccagcatcgaccgtttcgtgaagcgggggctggacgccggtctggaggtctgtgtcgggtgtgaggatgcctcccgcgccgatcccgacttcatgctgcaggtcgcagaggcggcgcagcgggccggcgcccggcggatccgcttcgccgacaccctgggcctgctggagccgatgtccaccttcgagcgcatccgccggctggccgtggccaccgatctggaaatcgagatgcacgcccacaacgacttcggcctggcgacggccaacaccctgatggcggtgcaggccggggcgagccatgtgaacaccacggtcaacggactgggggagcgggccggtaacgcggccatcgaggaaaccgtgatggctctgcaccagctctatggcatcgataccggcatcgccgtcgatcatttcccggagatttccggactggtggcggccgcctccggccggccggtggccgcgaacaagagcatcgtcggcgaggccgtgttcacccatgaggccggcatccatgtcgacggtctgctcaagaacctcatcaactaccagggcgtggatccgaaggatctgggccgtgagcaccgtctggtgctgggcaagcattccggcacccacgcggtgaagcggagcttccgccagctcgggatcgagctaagcgaaacggacgccggcaggctgctcaagcgcatccgcatccacgccagccagaccaagcgcccgcccagcgagaccgaactgaagctgttctacgccgaaacctcggtgtcgtcccagccgcgtccgggtcttttcggctga

SEQ ID NO: 6824 - protein, 384 aa, Methylococcus capsulatus str. Bath
MVAQRVTINDTTLRDGEQTAGVAFTAEEKLSIARALARAGVPEMEVGIPVMGAEEQEVIRAIAGLGLSARLMVWGRMCERDLAAAADCGADRVNLSIPVSDIHLRHKVNRTREWVLASIDRFVKRGLDAGLEVCVGCEDASRADPDFMLQVAEAAQRAGARRIRFADTLGLLEPMSTFERIRRLAVATDLEIEMHAHNDFGLATANTLMAVQAGASHVNTTVNGLGERAGNAAIEETVMALHQLYGIDTGIAVDHFPEISGLVAAASGRPVAANKSIVGEAVFTHEAGIHVDGLLKNLINYQGVDPKDLGREHRLVLGKHSGTHAVKRSFRQLGIELSETDAGRLLKRIRIHASQTKRPPSETELKLFYAETSVSSQPRPGLFG

SEQ ID NO: 6825 - DNA, 1545 bp, Methylococcus capsulatus str. Bath
  CDS (1)..(1545): transl_table=11
atgcacgacagactgatcattttcgacacgaccttgcgcgacggagagcagagccccggcgcgtccatgacccgcgatgaaaaggtccgcatcgcccgggcgctggagcgtctgaaggtcgacgtcatcgaggcgggctttcccgccgccagccccggcgatttcgaggccgtccaggccgtggcccggaccatcaaggacagcagggtctgcggcctggcccgcgccctcgaccgcgacatcgaccgcgccggcgaagccctcaaggacgcccagcgcgcccgcatccacaccttcatcgccacctcgcccatccacatgcggcacaagctgcagatgtcgcccgaccaggtggtggaatacgcggtcaaggccgtcaagcgggcccgccagtacaccgacgacgtggaattctcgcccgaggacgccggacgctccgaggaggatttcctctgccgcatcctggaagccgtgatcgatgcgggggcgaccacgctgaacatccccgacaccgtcggctacgccttcccggaacagttcgggcacatgatcggccggctgatcgagcggattccgaactccgacaaggccgtgttctcggttcactgccacaacgacctgggactggcggtcgccaattcgctggccgccgtgctgcacggcgcgcgccaggtggaatgcaccatcaacgggctgggcgagcgggccggcaacgccgcgctggaagagatcgtcatggcggtgcgcacccgtaaagacatcttcccctgccacaccgacatcgagacacgggaaatcgtggcctgctccaaactggtctccagcatcaccggtttcccgatccagcccaacaaggccatcgtcggcgccaacgccttcgcccacgagtcgggcatccaccaggacggtgtgctcaagagccgggaaacctacgagatcatgagcgccgaggacgtggggtggagcaccaaccgcatggtgctgggcaaacattccggccgcaacgcgttccgtacccggatgcaggaactcggcatcgagttcgcctcggaagaggaactgaactcggtgttccagcgcttcaaggtgctggccgacaagaagcacgagatcttcgacgaggacctccaggccctcatcaccgaagccggcgcagaagccgaagacgaacgggtcaagctggtcgcgctgcgggtctgctcggaaacgggcgagattccccacgcccaggtcaccatcaaggtggacaacgaggaacgcaccggcacatcgagcggcggcggcgccgtggacgccagcctcaaggccatcgaatcgctgctgcacacggacaccgcgctgacgctgtactcggtcaacaacatcaccagcggcaccgacgcccagggcgaggtcaccgtgcggctcgagaaaggcgggcgcatcgtcaacggccagggcgccgataccgacatcgtgatcgcctcggccaaggcctacgtcaacgccgtgaacaagctgctggcgcccatccagcgcacccacccgcaagtcggggatgtgtga

SEQ ID NO: 6826 - protein, 514 aa, Methylococcus capsulatus str. Bath
MHDRLIIFDTTLRDGEQSPGASMTRDEKVRIARALERLKVDVIEAGFPAASPGDFEAVQAVARTIKDSRVCGLARALDRDIDRAGEALKDAQRARIHTFIATSPIHMRHKLQMSPDQVVEYAVKAVKRARQYTDDVEFSPEDAGRSEEDFLCRILEAVIDAGATTLNIPDTVGYAFPEQFGHMIGRLIERIPNSDKAVFSVHCHNDLGLAVANSLAAVLHGARQVECTINGLGERAGNAALEEIVMAVRTRKDIFPCHTDIETREIVACSKLVSSITGFPIQPNKAIVGANAFAHESGIHQDGVLKSRETYEIMSAEDVGWSTNRMVLGKHSGRNAFRTRMQELGIEFASEEELNSVFQRFKVLADKKHEIFDEDLQALITEAGAEAEDERVKLVALRVCSETGEIPHAQVTIKVDNEERTGTSSGGGAVDASLKAIESLLHTDTALTLYSVNNITSGTDAQGEVTVRLEKGGRIVNGQGADTDIVIASAKAYVNAVNKLLAPIQRTHPQVGDV

SEQ ID NO: 6827 - DNA, 1635 bp, Silicibacter pomeroyi DSS-3
  CDS (1)..(1635): transl_table=11
atgacccgcgagcgcctttatctctacgacaccaccctgcgcgatgggcagcagacccagggcgtgcaattctcgaccccggaaaaactgcgcatcgccagcgcgctggatagcctcggcatcgactatatcgaaggcggttggcctggcgccaacccgaccgacagcgcctttttcgacgctgccccggcaacccgcgcgcggctgaccgcctttggcatgaccaaacggtcgggccgctcggcggagaacgacgatgtactggccgccgtgatgaatgcgggcaccggcaccgtctgtctggtcggcaaggcgcatgattaccacgtgacccaggcgctggggatcgagctggccgagaacaccgagaacatccgcgcctcgatggcccatatcgtggcgcaggggcgcgaggcactgtttgatgccgagcatttctttgacggctatcgcgacaatcccgcctatgcgctggaggtctgtcgcgccgcgctggaggcgggggcgcgctggatcgtgctctgtgacaccaatggcggcgccatgcccgccgatgtggcccgcgtggtgggcgaggtgatcgctgccggtatccccggcgaccgtctgggcatccattgccataacgacaccgatcaggcggtggcctgttcgctggccgccgtgatcgcgggcgcgcgccagatccagggcacgctgaacgggctgggcgagcgctgtggcaatgccaacctgacctcgctgatcccgacgcttttgctcaaggagccttatgccagccggttcgagaccggtgtcagcgcgggggcgctggccgatctgacccggatcagccgcatgctggacgatattctgaaccgggtgccggtgaaacaggcgccctatgtcggctcgtccgcctttgcccataaggccgggctgcatgccagcgcgatcctcaaggatccgtcgacctacgagcatatcgacccgtctttggtcggcaacgagcgcatcatcccgatgtcgaaccaggccggccagtcgaacctgcgtaaacggctgaccgatgcggggctgagcgtgccgccgggcgatccggcgctggggcatatcctggagcggatcaaggcgcgcgaggacgagggttattcctatgacacagcgcaggccagtttcgagctgctggcgcggcgcgaactgggccagatgcccgcgttcttcgaggtcaagcgctacaaggtcacggtcgagcggcgcaagaacaagtatgaccgcatggtcagcctgtccgaggcggtcgtggtggtcaaggtggatggcgaaaagctgctttcggtcagcgagtcgctggatgacaccggcagcgaccgcggcccggtcaacgcgctctacaaggcgctggccaaggatctggggcgctactcggcgatcctgagcgacatgcggctggtggatttcaaggtgcgcatcacgcaaggcggcaccgaggcggtgacccgcgtcatcatcgacagcgaggatggcaaggggcggcgctggtccaccgttggggtcagcgccaacatagtcgacgcctcgttcgaggcgcttctggacgcgatcaactggaagctgctgcgcgattgcgccgggcaaggggcggcggcggagtga

SEQ ID NO: 6828 - protein, 544 aa, Silicibacter pomeroyi DSS-3
MTRERLYLYDTTLRDGQQTQGVQFSTPEKLRIASALDSLGIDYIEGGWPGANPTDSAFFDAAPATRARLTAFGMTKRSGRSAENDDVLAAVMNAGTGTVCLVGKAHDYHVTQALGIELAENTENIRASMAHIVAQGREALFDAEHFFDGYRDNPAYALEVCRAALEAGARWIVLCDTNGGAMPADVARVVGEVIAAGIPGDRLGIHCHNDTDQAVACSLAAVIAGARQIQGTLNGLGERCGNANLTSLIPTLLLKEPYASRFETGVSAGALADLTRISRMLDDILNRVPVKQAPYVGSSAFAHKAGLHASAILKDPSTYEHIDPSLVGNERIIPMSNQAGQSNLRKRLTDAGLSVPPGDPALGHILERIKAREDEGYSYDTAQASFELLARRELGQMPAFFEVKRYKVTVERRKNKYDRMVSLSEAVVVVKVDGEKLLSVSESLDDTGSDRGPVNALYKALAKDLGRYSAILSDMRLVDFKVRITQGGTEAVTRVIIDSEDGKGRRWSTVGVSANIVDASFEALLDAINWKLLRDCAGQGAAAE

SEQ ID NO: 6829 - DNA, 1623 bp, Synechococcus elongatus PCC 6301
  CDS (1)..(1623): transl_table=11
atggccagcgcaagctcgaacgaccggattctcattttcgataccacgctccgggatggcgaacagtcacctggtgcaagcctaaacctagaagagaaactggtgatcgcgcgtcaactggctcgactgaatgtcgacattattgaggccggttttgcctttgctagtcccggtgattttggagcggtgcagcgcattgccgctgaagtcggcacaccggatggccccacgatttgtagtttggcgcgggcaactcgtcaggatatcaaagcagcggctgaagccttggcaccggcagccaaaggccgcattcacacctttatcgccacttccgacatccacctcgagtacaagctcaagaaaactcgggctgaggttttggcggtcatccccgagatggttggctatgccgcttccttggtcgatgacgtcgaattttcgccggaagatgcggggcgatcggatcctgaattcctctatgagtgtttggaagcggcgatcgcggcaggggccaaaacgatcaatattcccgacaccgtcggctacacgactcctagcgagtttggagccttgattggcggcattaaacagaatgtctgcaacattgatcaggcaatcatttccgtccatggtcacaacgacttaggccttgctgtcgccaacttcctagaagcggtcaaaaacggcgcgcgccagctggaatgtacgatcaacggcattggcgaacgagctggtaatgcggctctagaagagctggtgatggccctgcatgtgcgtcgccaatacttcaatccgttcttgggacgcgctgcagattcagaagcacccctaacccaagtcaacactcgcgaaatctacaaaacctcgcgcttggtctcgaatctgactgggatgttggtgcagccgaataaagcgatcgtgggggccaatgcctttgcacatgaatcgggtattcaccaagacggcgtcctcaaaaataagctgacctacgaaatcgtcgacgccgaaacgattggcctaagtaccaatcgcattaccctcggtaagctgtcggggcgcaatgccttccgtacccgtttgcaggagttgggctacgaccttggcgaggacgacttgaaccgagctttcctgcgcttcaaggaactagccgataaaaagcgggaagtcaccgatcgcgacttggaagcgatcgtcaatgacgaaacccagcaagcacccgagctgttcaagctggaattggtgcaggtttcagcgggcgatcatgcgcgtcccaccgccaccgtcaccctacgcactcccgaaggggaagaactgactgacgcagcgatcggtacggggccggttgatgcgatttatcgagccatcaatcgtgtggtgaacatcccgaatgagctgatcgagttttcggtcaagtctgtcacagcagggattgatgcgatcggcgaggtcacgattcgtctgcgtcatgaagaccggattttctctggacattcggctaataccgacatcctcgtagcctcggcccaagcctatattcacgctctcaaccggcttgccgaagcgttgcagaaggataagcccttgcatccgcaagaaccgattgtcgctggtatgggtcgttag

SEQ ID NO: 6830 - protein, 540 aa, Synechococcus elongatus PCC 6301
MASASSNDRILIFDTTLRDGEQSPGASLNLEEKLVIARQLARLNVDIIEAGFAFASPGDFGAVQRIAAEVGTPDGPTICSLARATRQDIKAAAEALAPAAKGRIHTFIATSDIHLEYKLKKTRAEVLAVIPEMVGYAASLVDDVEFSPEDAGRSDPEFLYECLEAAIAAGAKTINIPDTVGYTTPSEFGALIGGIKQNVCNIDQAIISVHGHNDLGLAVANFLEAVKNGARQLECTINGIGERAGNAALEELVMALHVRRQYFNPFLGRAADSEAPLTQVNTREIYKTSRLVSNLTGMLVQPNKAIVGANAFAHESGIHQDGVLKNKLTYEIVDAETIGLSTNRITLGKLSGRNAFRTRLQELGYDLGEDDLNRAFLRFKELADKKREVTDRDLEAIVNDETQQAPELFKLELVQVSAGDHARPTATVTLRTPEGEELTDAAIGTGPVDAIYRAINRVVNIPNELIEFSVKSVTAGIDAIGEVTIRLRHEDRIFSGHSANTDILVASAQAYIHALNRLAEALQKDKPLHPQEPIVAGMGR

SEQ ID NO: 6831 - DNA, 1545 bp, Bacillus clausii KSM-K16
  CDS (1)..(1545): transl_table=11
atgcgaaaaattaacgtgtttgatacgtcgctgcgcgatggagaacaaatgcctggcatcgctttgactgtaaaagagaagttagaaattgcccggcaattggaacgtctaggtgtggacattattgaggctggttttccagcctcctcacctggcgattttcaagcagtcaaggaaattgctgaaacagtaaaaggttcatccattaccggtcttgctcgggccaagaaaagcgatattgactctgcttgggaggcgttaaaatcaagcgctgaaccaagagtccacgtttttctggcgacatcgccgattcatatggaacataaacttaaactgactccagatcaagtagtggagcgtgcggtagaaagcgttcgttacgcagcggaaaaatttccccacgtccagttttcggcagaggatgcaaaccgttcagaatggccgttcttaaaacgaattattgaagcggcgattgatgcaggcgcttctgtcattaatcttcctgatacagttgggtatagaaccccagaagaaatatcgaaattgtttgaatttgtaaccgaaaatgtcaaaaacatcgaccgtgccattttatccactcataaccatgacgatcttggcatgggtgtagccaattcacttgccgctatttctgcgggggcgggccaagtagagtgtacaatcaatggcattggcgaacgtgctggaaacgcggcgctagaagaaatcgctgttgctttgcaaattcggtctgattattaccaggcgaaaacagggctaaaactatcagaactaaagcgcacaagcgcccttgtcagcaggctaacgtcgatgaatgttcctggaaataaagcggttgtaggagcgaacgcgtttgctcatgagtcaggcatccaccaagacggaatgctcaaaaacaaagaaacctatgaaatcattacgcctgaactggtcggcgctacgtcttcattgcctttaggaaaacattctggccgtcatgcatttaaaacaaagttgaatgaattaggtttttctggctctgacgaaaagctacaaacgattttcagcgcgtttaaacaactttgcgataagaaaaaagaagtgaccgaagatgatttgtatgcattgattgccgatgcaaccgatgatcaagatagcacagcttatgaactaactgcgctgcaagtcacgtatggaatgaaccacgtaccaactgccacgattcgccttaagaaacaggatgacagagaaatcgaagaagcagggactggttctggaagcgtcgaagcaatctacaatacattggcaaaaatgactggtggcaattacagcttagctgattaccgaatccagtcggtaaatggtggagaagatgcgttagcggaagttcatgtgcgcattcaagcagacgatttcgaacaaagcggacggggcgtggcacatgatgtgttagaggcatcagccaaagcgtatttgcacgctgtgaaccgcgtaatagcccggaagcattatgcaaaacgcgaaatggcgaaggtggaaagctaa

SEQ ID NO: 6832 - protein, 514 aa, Bacillus clausii KSM-K16
MRKINVFDTSLRDGEQMPGIALTVKEKLEIARQLERLGVDIIEAGFPASSPGDFQAVKEIAETVKGSSITGLARAKKSDIDSAWEALKSSAEPRVHVFLATSPIHMEHKLKLTPDQVVERAVESVRYAAEKFPHVQFSAEDANRSEWPFLKRIIEAAIDAGASVINLPDTVGYRTPEEISKLFEFVTENVKNIDRAILSTHNHDDLGMGVANSLAAISAGAGQVECTINGIGERAGNAALEEIAVALQIRSDYYQAKTGLKLSELKRTSALVSRLTSMNVPGNKAVVGANAFAHESGIHQDGMLKNKETYEIITPELVGATSSLPLGKHSGRHAFKTKLNELGFSGSDEKLQTIFSAFKQLCDKKKEVTEDDLYALIADATDDQDSTAYELTALQVTYGMNHVPTATIRLKKQDDREIEEAGTGSGSVEAIYNTLAKMTGGNYSLADYRIQSVNGGEDALAEVHVRIQADDFEQSGRGVAHDVLEASAKAYLHAVNRVIARKHYAKREMAKVES

SEQ ID NO: 6833 - DNA, 1086 bp, Thermococcus kodakarensis KOD1
  CDS (1)..(1086): transl_table=11
atggtgctggattcaacgctcagggaaggggagcagacacccggggtaaacttcagcccggaggacaggcttagaataggaatcgccctcgatgaggtcggagtcgattttatagaggccggccatccggcagtaagcggggagatccttgaggggatacgccttctcgcttcccatggcctcaacgcgaacattctggcgcactcaagggccctgaggagcgatatcgacctcgttctgaaggccgaagcagaatggataggtatcttcatgtgcctctctcagaggtgcctggaaaggaggttcaggacggatctcagcggagccctcaccagggtcgaggatgctattctatacgccaaggaccacgggctgaagatccgcttcacaccggaggacaccacgaggacggagtggaagaacctcacagcagctctgaacctcgccagggagctcaaggtcgacagggtgagcatagcggacacaaccggagccgctcatcccctcgagttctacgacctcgtcaagcgcgtcgtcgagttcgggattcccgtaaatgtgcactgccacaacgacctgggattggccctggcaaacgcgataatgggaatcgaggccggggctacgctggtggatgccaccgttaacggaattggggagagggcagggatagtcgacctgtcccatcttctggcggcgctctactaccactacggggtcaaaaagtacaggctggagaagctctactcgctgagcagactcgtgagcgagataaccggccttcaggtccaggtcaactaccccatagtcggccagaacgccttcacacacaaggccggcctgcacgtttcggcggtcgtcagggatccgtctttctacgagttccttccggctgaaacattcggcagggagaggaccatctacgtcgaccgcttcgcaggcagggagacgatacgcttccatctatccagattcggaatccacgacgaggagataatcgaagagctcctcaggagggtaaaggcctcaaggaggcccttcacacccgagatgctggccgaagaagcgaggaggatgatgacatga

SEQ ID NO: 6834 - protein, 361 aa, Thermococcus kodakarensis KOD1
MVLDSTLREGEQTPGVNFSPEDRLRIGIALDEVGVDFIEAGHPAVSGEILEGIRLLASHGLNANILAHSRALRSDIDLVLKAEAEWIGIFMCLSQRCLERRFRTDLSGALTRVEDAILYAKDHGLKIRFTPEDTTRTEWKNLTAALNLARELKVDRVSIADTTGAAHPLEFYDLVKRVVEFGIPVNVHCHNDLGLALANAIMGIEAGATLVDATVNGIGERAGIVDLSHLLAALYYHYGVKKYRLEKLYSLSRLVSEITGLQVQVNYPIVGQNAFTHKAGLHVSAVVRDPSFYEFLPAETFGRERTIYVDRFAGRETIRFHLSRFGIHDEEIIEELLRRVKASRRPFTPEMLAEEARRMMT

SEQ ID NO: 6835 - DNA, 1581 bp, Colwellia psychrerythraea 34H
  CDS (1)..(1581): transl_table=11
atgagcaacccacaaattaataatgaccaagttataatttttgacactactttacgtgatggtgagcaagcattaaatgccagcttatcggtacatgaaaaacttcaaattgccttagcaattgaacgcttaggggtagacgtaatggaagtcggttttccggtttcttctcctggcgattttgaatcagtacagcaaattgcccgcacaataaaaaatgctcgtgtttgtggtttagcgcgcgcagtagaagcagatattgatgcctgtgcagaagcgttaaaagttgcggaccaatttcgtatccatacctttatttcaacctctgatgtgcacgtacagcaaaaactaaaaaaagaatttagtgatgtagaagcaatggcaattcacgcggttaagcatgcaagaaagtacactgatgacgtcgagttctcttgtgaggatgcaggccgtacgccaattgataatttatgtcgcatggtagaaggtgctattaaagccggcgccaccacagtcaatattcccgatacagtcggctacaccctacccttcgaatttcaaggcatcataactgacttgtttaatcgtgtacctaatattgaccaagcgataatctctgtccattgtcataatgacttaggtttagctgtcgctaactctatggctgcagttcaagctggagcacgtcaaattgaatgtactatcaatggtattggtgaacgtgcgggtaactgttcgttagaagaagtcgccatgatcatgcaaacacgtcaagcattgttaggtgtaaaaaccaatatcaatcaccaagaaatagcacgtgtgtctaagttagtcagcacagtatgtaatatgcctgtacaattaaataaagccattgttggcggtaatgcgtttagccattcatcaggtattcatcaagatggcatgttaaaagctagtaatacgtacgagatcatgacacctgaaagtgtcggtatcgccaaaactaaattaaacctaacctctcgcagtggccgtcatgtcataaaacaccgcatggaaagtttaggttaccaagaaagtgattatgaaattgaagaattatatgctgactttttaacattggcagataaaaaaggtcaagtatttgatgatgacttagaggcgttagtgtttaagttacagcaaaaagatttacaagattttttccagttagacacgattaatgtgcaatgtggtgatggcgagttttctaccgctagcatcaagctcatctctggtgaagtaacaggtgataaagagaatagcaagacacatgctgctacaggtaacggtcctgttgatgcgctgtatcaagcaattaagcaaagtgttgatatagaatttgaagtcagtgattacaaaatatctaataaaggctcaggtgaagatggtttaggccaagccgatttaataatcatttggcaaggtagaaatttccacggctatggtttagaaactgatgtaattgaagcatcaggacaagcattaattaatgcactaaacagcatccatagagcgatgactattgctgatttgaaatccgcaaaacaagcttaa

SEQ ID NO: 6836 - protein, 526 aa, Colwellia psychrerythraea 34H
MSNPQINNDQVIIFDTTLRDGEQALNASLSVHEKLQIALAIERLGVDVMEVGFPVSSPGDFESVQQIARTIKNARVCGLARAVEADIDACAEALKVADQFRIHTFISTSDVHVQQKLKKEFSDVEAMAIHAVKHARKYTDDVEFSCEDAGRTPIDNLCRMVEGAIKAGATTVNIPDTVGYTLPFEFQGIITDLFNRVPNIDQAIISVHCHNDLGLAVANSMAAVQAGARQIECTINGIGERAGNCSLEEVAMIMQTRQALLGVKTNINHQEIARVSKLVSTVCNMPVQLNKAIVGGNAFSHSSGIHQDGMLKASNTYEIMTPESVGIAKTKLNLTSRSGRHVIKHRMESLGYQESDYEIEELYADFLTLADKKGQVFDDDLEALVFKLQQKDLQDFFQLDTINVQCGDGEFSTASIKLISGEVTGDKENSKTHAATGNGPVDALYQAIKQSVDIEFEVSDYKISNKGSGEDGLGQADLIIIWQGRNFHGYGLETDVIEASGQALINALNSIHRAMTIADLKSAKQA

SEQ ID NO: 6837 - DNA, 1137 bp, Dechloromonas aromatica RCB
  CDS (1)..(1137): transl_table=11
atgcaacagcccttcatcaccatcaacgacacgacattacgcgacggcgagcaatcggccggcgtggccttttcgttggatgaaaaactggacatcgcccgccagctcgccgccatcggcgtgccggaactggaagtcggcattcctgcgatgggcgacgaggagcgcgactcgatccgcgccgtcgccgatctccagctcgccccgcgcctgatggtgtggagccgcatgcacccgaccgacatcgccgcctgcgccggcctgggcgcccacttgatcgacatttcggtaccggcctcagaccagcacctggcctacaagttgaagcaggaccgcgcctggttgctgcgcgaactgcccaagttcattggcgccgccctgtcgcttggcctcgaagttggcctcggttgcgaagacgcctcgcgtgccgacatgaatttcctttgtgcgctggccgaaacggccgaacgggccggcgcccgccgcctgcgcttcgccgatacgctgggtattctcgaaccctttggcaccttcgaccgcatttcgaccctgcgccgcaacaccggcctggaaatcgaaatgcacgcccacgacgacatgggcctggccaccgccaacacgctggccgcctgcaaggccggtgcgacgcacgtcaataccacggtcaacggtctgggcgaacgggccggcaatgccccgctggaagaagttgtcctcggcctgaccaagctttatggcatcgagaccaatgtcagcctcaagggcttcccgtcactgtcagccaaggtggccagcgcttcggggcgcgccatcccctggcagaagagcgtcgtcggcgccggcgccttcacgcacgaagccggaatccatgtcgatggcctgttgaagcaccctgacaattaccagggtttcgacccgcgcgaagttggccagtcacaccgcatcgtgctcggcaagcattccggttcgcgcgccgtgcaggtcgtctatgcgggcctcggtttcgaactcggcgagaccgaagcccaggccatgctgccgcgcgtccgcacctttgtcgccgaacacaaacacccgccggaagtgtccgatctgcgcgaccttctgagctccctccggagcaacctccatgtctga

SEQ ID NO: 6838 - protein, 378 aa, Dechloromonas aromatica RCB
MQQPFITINDTTLRDGEQSAGVAFSLDEKLDIARQLAAIGVPELEVGIPAMGDEERDSIRAVADLQLAPRLMVWSRMHPTDIAACAGLGAHLIDISVPASDQHLAYKLKQDRAWLLRELPKFIGAALSLGLEVGLGCEDASRADMNFLCALAETAERAGARRLRFADTLGILEPFGTFDRISTLRRNTGLEIEMHAHDDMGLATANTLAACKAGATHVNTTVNGLGERAGNAPLEEVVLGLTKLYGIETNVSLKGFPSLSAKVASASGRAIPWQKSVVGAGAFTHEAGIHVDGLLKHPDNYQGFDPREVGQSHRIVLGKHSGSRAVQVVYAGLGFELGETEAQAMLPRVRTFVAEHKHPPEVSDLRDLLSSLRSNLHV

SEQ ID NO: 6839 - DNA, 1542 bp, Dechloromonas aromatica RCB
  CDS (1)..(1542): transl_table=11
atgaaacagcacctggttattttcgatactaccctgcgcgacggcgagcaaagccccggcgcatcaatgaccaaagaagaaaaaatccgcgttgcccgccagcttgagaaaatgcgggttgatgtcatcgaagcaggttttgcggcagcttcgccaggcgattttgacgccattcactccattgcacagaccatcaaggattcgacggtctgctcgctggcacgggccaacgagaacgatattcgccgggctggtgaggcaatcaaaccagcgcaatcgggtcgtattcatacttttatcgccacttctcccattcacatggagaagaagttgcggatgacgcccgatcaagtggtcgagcaggcggttaaagcgattggctgggcgcgcgaatatacggacgatattgaattttcggccgaggatgccgggcgttctgatctggattttctctgtcgcattttcgaggaggtcatcaaggccggagcaacgaccatcaatgtgccggatacggttggctacaacattccatcgcagtatgcggaaaccatgcgccagttgatcgaacgggtgcctaattccgacaaggtggtctggtcagtccactgtcacaacgacctcgggctggctgtctccaactcgctggcggcggtcctttgcggggcgcgccaggttgaatgcacgatcaacggccttggcgagcgggccggcaatgcggcgctggaagaaatcgtcatggcggtgcgtacccgggccgatgtctttccggtcgagacgcgtatcgatacgacccagatcgtgccggcttcaaagctggtgtcgcagattacaggttatcccgtgcagccgaacaaggccgtggtcggcgctaatgcttttgcccacgagtcgggcatccatcaggatggcgtgctgaagcatcgcgaaacctatgagatcatgcgggcgcaggatgtgggctggacgcagaacaagctggtgcttggcaagcattccggtcgcaatgccttcaagaatcgcctgcaggagttgggtattgagctggaaagcgacgaggcgttgaatgctgcttttgcccgtttcaaggaattggccgacaagaagcatgaaatcttcgacgaagacctgcatgccttggtatccgacgatctggtgacgccggatcaggagtactacaagctggtttattcccgcgtctgttcagagaccggcgagatgccgcgggcttcagtgattcttaatatcggcggagtcgagcacaaggccgaagccgatggcggtggtccggtcgatgcgaccttcaaggccatcgagagcattgctggtagtggtgccgaattgctgctttattcagtcaatgcgattacgaccgggaccgatgcgcagggcgaggtgacaacccgtctttccaagggcgaccgtatcgtcaatggcaatggtgcggatacggatatcgtgatcgcttcagcgcgttcctatctgaatgcgctgaacaagctgcattcgacgctcgataaggtcaaggcgcaaggcggcgtctga

SEQ ID NO: 6840 - protein, 513 aa, Dechloromonas aromatica RCB
MKQHLVIFDTTLRDGEQSPGASMTKEEKIRVARQLEKMRVDVIEAGFAAASPGDFDAIHSIAQTIKDSTVCSLARANENDIRRAGEAIKPAQSGRIHTFIATSPIHMEKKLRMTPDQVVEQAVKAIGWAREYTDDIEFSAEDAGRSDLDFLCRIFEEVIKAGATTINVPDTVGYNIPSQYAETMRQLIERVPNSDKVVWSVHCHNDLGLAVSNSLAAVLCGARQVECTINGLGERAGNAALEEIVMAVRTRADVFPVETRIDTTQIVPASKLVSQITGYPVQPNKAVVGANAFAHESGIHQDGVLKHRETYEIMRAQDVGWTQNKLVLGKHSGRNAFKNRLQELGIELESDEALNAAFARFKELADKKHEIFDEDLHALVSDDLVTPDQEYYKLVYSRVCSETGEMPRASVILNIGGVEHKAEADGGGPVDATFKAIESIAGSGAELLLYSVNAITTGTDAQGEVTTRLSKGDRIVNGNGADTDIVIASARSYLNALNKLHSTLDKVKAQGGV

SEQ ID NO: 6841 - DNA, 1137 bp, Anabaena variabilis ATCC 29413
  CDS (1)..(1137): transl_table=11
atgcaaatgaataaagttctaattaatgacactacactacgcgatggagagcaagcggcgggtgttgcttttagcgtagaggaaaaaatcgcgatcgccaaatttctggatgcgatcggtgtggatgaaatcgaagtgggaatacccgcaatgggtaaagcagaacaagaggcgatcgctaatattgtgaagttgaatttgtccgccaatctacttggttggaaccgcgccgtgatttctgatattcaggcttccatcgcttgtggtttacagcgagtacatatctctattcccgtttctgcaatccaaatcgccgccaaatttcacggacaatggcaagtagttttacaaaaactccacgacagtattagctttgctgttgaccaaggtttatttgtatccatcggtggtgaagactcatcaagagccgaagaaagcttcctccttgatgtagtactggctgctcaagaatggggtgcctcacggtttcgcttttgtgacacagtaggtattcttgacccatttactacccacgccaaaataaaacaattggtggcatctttgacaatacctgtagaaatgcacacccacaatgattttggtttggcaacagctaacgctctcgcaggtatcaaagcaggcgctttatcggtaaatactactgtgaatggattgggtgaacgagctgggaatgctgctttagaagaggtggttatggctctcaagcacttgtatcaccatgatttaggaattgatacgcggcgtttactggaaatatctcaactcgtagtatcagcatcaggtcatcctgtaccaccttggaaagcaattgttggtgaaaatacttttgctcacgaatccgggattcatgctcatggtgtactgcaaaatccccagacctacgaaccatttgcaccagaagaagtagggagagagcgccgtttagttgtgggtaaacattctggtagacatttactgtccagtattttgcagcaacacgacattattctcaatcacgaagaaacccaatctgtcttagatgcagttagacaagaatcagtagaaaaaaaacgcagcctcacacctcaagaacttttacatttagtgcagacaaaacaacattttcgtgcctgttga

SEQ ID NO: 6842 - protein, 378 aa, Anabaena variabilis ATCC 29413
MQMNKVLINDTTLRDGEQAAGVAFSVEEKIAIAKFLDAIGVDEIEVGIPAMGKAEQEAIANIVKLNLSANLLGWNRAVISDIQASIACGLQRVHISIPVSAIQIAAKFHGQWQVVLQKLHDSISFAVDQGLFVSIGGEDSSRAEESFLLDVVLAAQEWGASRFRFCDTVGILDPFTTHAKIKQLVASLTIPVEMHTHNDFGLATANALAGIKAGALSVNTTVNGLGERAGNAALEEVVMALKHLYHHDLGIDTRRLLEISQLVVSASGHPVPPWKAIVGENTFAHESGIHAHGVLQNPQTYEPFAPEEVGRERRLVVGKHSGRHLLSSILQQHDIILNHEETQSVLDAVRQESVEKKRSLTPQELLHLVQTKQHFRAC

SEQ ID NO: 6843 - DNA, 1596 bp, Anabaena variabilis ATCC 29413
  CDS (1)..(1596): transl_table=11
atgactactaaaccagagagaattatcatttttgatacaacactccgtgacggggaacagtgtcctggtgcaacactgaatatagatgaaaagctggcgatcgccaaacagttagcccgcttaggtgtagatatcatagaggcaggtttcgcttttgctagccctggggattttgaagcagtccataaaattgcccaaactgtagggacggaaaatggcccggtaatttgcagtttggcaagagctaggcatgatgatatcaaagcggcagccgaagctattaaaccagcagctaaaggcaggattcacacctttattgctacctcagatattcacctccagtacaagctgaaaaaaaccagaccagaagtgattgcgatcgccgaagaaatggtagcttatgccaaaagtttcaccgatgatgtggaattttccccggaagatgctggacgttcagacccagaatttttgtatcaggttttagagcgagcgatcgccgccggtgcaacaacaattaacattccggataccgttggttacaccacaccaagcgaatttggggcaataattaagggcattaaagaaaatgtccccaacatcgaccaagcaattatttctgttcacggacacaatgatttaggcttggcagttgccaacttcttagaagcagttaaaaatggtgcaagacaactagaatgcaccatcaatggtattggtgaaagagcaggaaacgccgccttagaagaattggtaatggcgatgcacgtccgcagacaatactttaatcccttcttaggtagacacccagattcggaagaaccactcaccaatattgacaccaagcaaatatataaaacctcacgcttggtttctaatttaacaggaatgttagtacaacccaataaggcgatcgttggggctaacgccttcgcccatgaatcaggaattcaccaagatggagttttgaaaaacaaactcacctacgaaatcatggatgcccaattgattggcttaacagacaatcaaatagttttaggcaaacattctgggcgtaatgctttccgtacccgcttgaaagaattaggctttgaactatcagaaactgagttaaataaagccttcgtcaaattcaaagaagtcgccgataaaaagaaagaaatttctgattgggacttggaagcaattgttaatgacgaaatccagcaagcccctgatttattccgcgtagagttggtacaagtttcctgcggtagcaatgcacgtccaacagcaacagttaccctccgcaccccagacggcgaagaactcaccgacgcagccattggtacagggccagtagacgcggtatataaagcaattaaccgcgtggtcaacgtccccaaccaattaattgagttctccgtgcagtcagtaacagccgggattgatgccattggggaagtgacaattcgtttgcggtatgaatcacgagtattttccggtcatgcggccaacaccgatatcatcgtcgcctctgcacaagcctacgttaacgccctaaatcgtttatacgcatccttgcagactcaagataagcaaacagaagtaacagcataa

SEQ ID NO: 6844 - protein, 531 aa, Anabaena variabilis ATCC 29413
MTTKPERIIIFDTTLRDGEQCPGATLNIDEKLAIAKQLARLGVDIIEAGFAFASPGDFEAVHKIAQTVGTENGPVICSLARARHDDIKAAAEAIKPAAKGRIHTFIATSDIHLQYKLKKTRPEVIAIAEEMVAYAKSFTDDVEFSPEDAGRSDPEFLYQVLERAIAAGATTINIPDTVGYTTPSEFGAIIKGIKENVPNIDQAIISVHGHNDLGLAVANFLEAVKNGARQLECTINGIGERAGNAALEELVMAMHVRRQYFNPFLGRHPDSEEPLTNIDTKQIYKTSRLVSNLTGMLVQPNKAIVGANAFAHESGIHQDGVLKNKLTYEIMDAQLIGLTDNQIVLGKHSGRNAFRTRLKELGFELSETELNKAFVKFKEVADKKKEISDWDLEAIVNDEIQQAPDLFRVELVQVSCGSNARPTATVTLRTPDGEELTDAAIGTGPVDAVYKAINRVVNVPNQLIEFSVQSVTAGIDAIGEVTIRLRYESRVFSGHAANTDIIVASAQAYVNALNRLYASLQTQDKQTEVTA

SEQ ID NO: 6845 - DNA, 1134 bp, Anabaena variabilis ATCC 29413
  CDS (1)..(1134): transl_table=11
atgaataaagttctcattaatgacactacattacgtgatggcgaacaagccgcaggtgttgtttttaccttagaagagaaagtggcgatcgctaaatttctcgataccatcggcgtacccgaattagaagtggggattccggcgatgggtgaggaagaaatgcgggcgatctgcgccatttctaacttaggtttaaaagctaacctcctggcgtggaaccgcgccgtaatttcagatatcaaagcttctgttgcttgcgggatggagcgagtgcatattgcgatccctgtttccgggattcaaatcgccgcaaaattccacggacaatggcgggtaagtctgcaaagactcaaagattgtatcagcttcgcagttgatcaaggtctttgggtagcagtcgggggggaagattcctctagagctgatgaaaacttcctcttggatgtagcactatacgctcaagaatggggtgcatctcgattccgcttctgtgacacagtaggagtcctcgatcctttcaccacctacggaaaagttaagctactcgtctcagctttaacaattcctgtagaagtccatactcacaatgattttggtatggcgacagctaacgccctagcaggaattaaagctggagccgcatctgtcaatactaccgtgattggcttgggtgaaagagcaggtaacgccgccttagaagaagtcgttatggctatcaaacgcatctatggcgtagatatggggattgacacaccccgtttgttggaattgtcccaactggtagcagccgcctctggtgctaacgtaccaccttggaaggcgatcgttggtgaaaatacctttgctcacgaatcaggtattcatgcacatggtgtactgcaaaatcctgatacctatgaaccattcgcacctgaagaagtcggttgggaacgccgcttagttgtaggtaagcattctggcagacattcagtctccaacttgctagaacagcacgggatatttttgaacccagaagaaacccagtctgttttagatgcagtgcgccaacagtcagttaagaaaaaacgcagtttgactacagaagaactgttgaacttggtcaaagaacagaggtattctcatgcagcgcgatga

SEQ ID NO: 6846 - protein, 377 aa, Anabaena variabilis ATCC 29413
MNKVLINDTTLRDGEQAAGVVFTLEEKVAIAKFLDTIGVPELEVGIPAMGEEEMRAICAISNLGLKANLLAWNRAVISDIKASVACGMERVHIAIPVSGIQIAAKFHGQWRVSLQRLKDCISFAVDQGLWVAVGGEDSSRADENFLLDVALYAQEWGASRFRFCDTVGVLDPFTTYGKVKLLVSALTIPVEVHTHNDFGMATANALAGIKAGAASVNTTVIGLGERAGNAALEEVVMAIKRIYGVDMGIDTPRLLELSQLVAAASGANVPPWKAIVGENTFAHESGIHAHGVLQNPDTYEPFAPEEVGWERRLVVGKHSGRHSVSNLLEQHGIFLNPEETQSVLDAVRQQSVKKKRSLTTEELLNLVKEQRYSHAAR

SEQ ID NO: 6847 - DNA, 1119 bp, Anabaena variabilis ATCC 29413
  CDS (1)..(1119): transl_table=11
atgaacaacgtggttattcacattaacgatacaaccttgcgagatggggaacaggcggcgggtatagcctttaatgtggaagaaaaaattgcgatcgcctctctactcgattctatcggtgttcacgaattagaagttggcattcccgcaatgggacatgaagaagctgaatcgattacaaggattgccaaattaggattaaatgccaaactactcggctggaatcgggcgaatttgtcagatatccaagcatctatcgattgtggtttggatagagttcatgtttctgttcccgtctccgatattcagatagctgctaaattcaaaggacaacgacagttagtcttagataaactacgggatgcaattaattttgcctgcgatcgcggtttatctgtctccgtcggtggcgaagactcttccagagccgatgaatccttcctactagaagttgcccaatctgcccaagaatggggcgcgtttcggtttcgcttctgtgataccgtaggaattctcgaccccacaaccacctacaaaaaagttagtcatttggtatcgcacctatcaattgttatcgaaatgcacacacatgacgactttggtatggccttagcgaacaccttagccggtgtaaaagctggcgcgatatctgtgaacaccaccgtcaatggtataggtgaacgagccggaaatgcacccttagaagaagtagtgatgggactcaaatatctctacgatatacccacaggtattgataccaaacgactcgtagaagtatcaagactagtctccaaagcgactaatttccctgtacttccttggaaagcgatcgttggtgaaaatacctttgcacacgaatcagggattcatgctcatggcgtactgcaaaaccccatcacctatgaaccattcgcaccagaagacgtaggttgggaacgacgcttagtagtaggtaaacattccggtcgccatctcctactcagcgtcctggaacaacacggtatcaccctcggccaagccgaaattcaatcagtattagatgcagtccgccatcaatcagtcaaaaccaaacgcagcctcaccgttgaagaactactaagtttagttcctcaaagataa

SEQ ID NO: 6848 - protein, 372 aa, Anabaena variabilis ATCC 29413
MNNVVIHINDTTLRDGEQAAGIAFNVEEKIAIASLLDSIGVHELEVGIPAMGHEEAESITRIAKLGLNAKLLGWNRANLSDIQASIDCGLDRVHVSVPVSDIQIAAKFKGQRQLVLDKLRDAINFACDRGLSVSVGGEDSSRADESFLLEVAQSAQEWGAFRFRFCDTVGILDPTTTYKKVSHLVSHLSIVIEMHTHDDFGMALANTLAGVKAGAISVNTTVNGIGERAGNAPLEEVVMGLKYLYDIPTGIDTKRLVEVSRLVSKATNFPVLPWKAIVGENTFAHESGIHAHGVLQNPITYEPFAPEDVGWERRLVVGKHSGRHLLLSVLEQHGITLGQAEIQSVLDAVRHQSVKTKRSLTVEELLSLVPQR

SEQ ID NO: 6849 - DNA, 1590 bp, Rhodobacter sphaeroides 2.4.1
  CDS (1)..(1590): transl_table=11
atgaccgacacgaccaagaccgcctccgagcaggaccgcgtcctgattttcgacaccacgctcagggatggcgaacagtcgcccggcgcgaccatgacgcatgacgagaagctcgagatcgcggcgctgctcgacgagatgggcgtggacatcatagaggcgggcttccccatcgcctccgagggcgatttcgaggccgtctcggccatcgcgcggcagtcgaagaacgccacgatctgcggcctcgcgcgggccaactacaaggacatcgaccgctgctgggaggcggtgcgccacgcgaaatccccccgcatccacaccttcatcggcacctcgccgctgcaccgggcgatcccgaacctcgacatggaccagatggccgagcggatccacgacacggtgagccacgcccgcaacctctgcgacaatgtgcaatggtcgccgatggatgcgacgcggaccgagcacgattatctctgccgcgtggtcgagatcgcgatcaaggcgggcgccaccacgatcaacatccccgacacggtgggctacaccgccccgcgcgaaagcgccgacctgatccggatgctcgtcgagcgcgtgccgggtgcggacacgatcgtcttcgccacccactgccacaacgatctgggcatggcgacggcgaacgcgctggcggccgtcgaggcgggcgcgcggcagatcgaatgcacgatcaacggcctcggcgagcgcgcgggcaacaccgccctcgaagaggtggtgatggcgctgaaggtgcgcaacgacatcatgccgttccgcaccggcatcgatacgaccaagatcatgaacatcagccgcaaggtcgccaccgtctcgggcttcccggtgcagttcaacaaggccgtcgtcggcaagaacgccttcgcccacgagtccggcatccatcaggacgggatgctgaagaacgcccagaccttcgagatcatgcgacccgcggacgtgggcctcgccgacacgtcgctggtgatgggcaagcattcgggccgggcggcgctgcgcgccaagctcaaggatctgggctacgatctggccgacaaccagctgaacgacgtcttcgtgcggttcaaggcgctcgccgaccgcaagaaggaggtctatgacgacgacatcgtcgccctgatccaggatcaggtgacctcggccgaacatgacacgctgcagctcaagcggctgcgcgtggtctgcggcaccgacggcccgcaggaggccgagatgacgctctcggtcgagggggtggaccatgccatcgacgcgaccggcgacgggccggtggatgcggccttcaacgcggtgaagatgatctatccgcaccatgccaagctgcatctctatcaggtccatgcggtgaccgagggcaccgacgcgcaggcgacggtctcggtccggctcgaggaggacggcaagatcgccacgggtcaggccgccgacaccgacacggtggtggcgagcgtgaaggcctatgtgaacgcgctgaaccgcctgatccaccgtcgccagaagtcggcgccgggcgcggacatgaaggacgtgcattacagctcgcacgcctga

SEQ ID NO: 6850 - protein, 529 aa, Rhodobacter sphaeroides 2.4.1
MTDTTKTASEQDRVLIFDTTLRDGEQSPGATMTHDEKLEIAALLDEMGVDIIEAGFPIASEGDFEAVSAIARQSKNATICGLARANYKDIDRCWEAVRHAKSPRIHTFIGTSPLHRAIPNLDMDQMAERIHDTVSHARNLCDNVQWSPMDATRTEHDYLCRVVEIAIKAGATTINIPDTVGYTAPRESADLIRMLVERVPGADTIVFATHCHNDLGMATANALAAVEAGARQIECTINGLGERAGNTALEEVVMALKVRNDIMPFRTGIDTTKIMNISRKVATVSGFPVQFNKAVVGKNAFAHESGIHQDGMLKNAQTFEIMRPADVGLADTSLVMGKHSGRAALRAKLKDLGYDLADNQLNDVFVRFKALADRKKEVYDDDIVALIQDQVTSAEHDTLQLKRLRVVCGTDGPQEAEMTLSVEGVDHAIDATGDGPVDAAFNAVKMIYPHHAKLHLYQVHAVTEGTDAQATVSVRLEEDGKIATGQAADTDTVVASVKAYVNALNRLIHRRQKSAPGADMKDVHYSSHA

SEQ ID NO: 6851 - DNA, 1653 bp, Rhodobacter sphaeroides 2.4.1
  CDS (1)..(1653): transl_table=11
gtgacggggcagggggcggcgccggggccggtgaaggagcggctctggatctatgacacgacgctgcgcgacgggcagcagacgcagggcgtgcagttctcgacgcccgagaagcggcagatcgccgaggcgctcgaccggctcggggtggattacatcgagggcggctggccgggggccaacccgaccgactcggagttctttgcggccttgccccgcgtccgggcgcgggtgacggccttcggcatgaccaagcgcgcgggccgctcggccgagaatgacgatgtgctggccgcggtgctcgatgcgggcacggacacggtctgcctcgtcggcaagacgcacgaattccatgtgacgacggcgctcggcgtgacgctcgaggagaacctcgaggcgatccgcgcctcggtcgcgcatgtcgtggcgaaggggcgcgaggcgatcctcgatgccgagcatttcttcgacggctaccgcgccaatcccgcctatgcgctggattgcctgcaggcggcgctcggggcgggggcgcgctgggtggtgctctgcgacacgaacggcggcacgctgcccgccgaggtggggcgcatcgtggccgaggtcatcgccgcgggcgtgcccggcgaccggctggggatccacacccatgacgacacgggcaccgcggtggcggccacgcttgcggccgtcgatgccggggcgcggcaggtgcagggcacgctgaacggcttgggcgagcgctgcggcaacgcgaacctcaccacgctcatccccaccttcctgctgaaggagccctatgccagccgcttcgagaccgggatcgaccgcgaggccctgagcggcatggtgcgggtgagccggatgctcgacgacatcctgaaccgggtgccgcgccgggcctcggcctatgtcggcgcctcggccttcgcgcacaaggcggggctccatgcctcggcgatcctgaaggatcccgccacctacgaacatgtcgatcccgcgctggtgggcaacgtgcgggtgatccccatgtcgaaccaggccgggcagtcgaacctgcgggcgcggctggccgaggcggggctcgaggtgccttcgggcgatccgcggctgggccggatcctcgagacggtcaaggcgcgcgaggatcagggctatgcctacgattccgcgcaggcgagcttcgagctggtggcgcggcgagagctgggcctcctgcccagcttcttcgaggtgaagcgctaccgcgtgaccgtcgagcggcggcgggtgggcgagggcaccatgacgctctcggaagcggtggtcgtggtgctgatcgacgggcagcgcgtgctgtcggtctcggaaagcctcgacgagaacggcaccgagcgcggcccggtgaacgcgctgtcgaaggcgctggccaaggatctcggccgctggcagtcggtgatcgacgacatgcggctggtggatttcaaggtgcggatcacgcagggcggcaccgaggccgcgacccgcgtcatcatcgacagcgaggacgggcagggccggcgctggtcgacggtgggggtctcgcccaacatcgtcgatgcctcgttcgaggcgctgctcgacgcgatcaactggaagctcgtgcgcgatgcacggcaggaggacagccgatga

SEQ ID NO: 6852 - protein, 550 aa, Rhodobacter sphaeroides 2.4.1
MTGQGAAPGPVKERLWIYDTTLRDGQQTQGVQFSTPEKRQIAEALDRLGVDYIEGGWPGANPTDSEFFAALPRVRARVTAFGMTKRAGRSAENDDVLAAVLDAGTDTVCLVGKTHEFHVTTALGVTLEENLEAIRASVAHVVAKGREAILDAEHFFDGYRANPAYALDCLQAALGAGARWVVLCDTNGGTLPAEVGRIVAEVIAAGVPGDRLGIHTHDDTGTAVAATLAAVDAGARQVQGTLNGLGERCGNANLTTLIPTFLLKEPYASRFETGIDREALSGMVRVSRMLDDILNRVPRRASAYVGASAFAHKAGLHASAILKDPATYEHVDPALVGNVRVIPMSNQAGQSNLRARLAEAGLEVPSGDPRLGRILETVKAREDQGYAYDSAQASFELVARRELGLLPSFFEVKRYRVTVERRRVGEGTMTLSEAVVVVLIDGQRVLSVSESLDENGTERGPVNALSKALAKDLGRWQSVIDDMRLVDFKVRITQGGTEAATRVIIDSEDGQGRRWSTVGVSPNIVDASFEALLDAINWKLVRDARQEDSR

SEQ ID NO: 6853 - DNA, 1530 bp, Carboxydothermus hydrogenoformans Z-2901
  CDS (1)..(1530): transl_table=11
atggaaagggttaggatttttgatacgacgttaagggatggggaacagtcgccaggagttagtttaaatgctatggagaaattgcaaatcgcccggcagttacaaaagctgggcgttgatgttatagaggcaggttttcctataacttctcccggagataaggaagccgtttccttaattgcccgggaagtaaaaggggtggtagtggctgccctggcccgggcttcggctttggatatagaaacggcctgggacgccattaaagatgcggaaagtccccggattcatacttttattgccacttccgatattcatttgaaatataagctgaaaatggaccgggaaacggtagtggaacgggcggtagcagcggtcaaacttgctaaaaaatttaccgccgatgtggagttttcggcggaagatgcttcaagaagtgacctggactttttgtgccgggtggtggaagcggcggtaaaagcgggagctactaccataaacattcccgataccgttggctatgccgaaccggaagagtttggggagtttatttgcaaaattttagaaaaagttccggtaatggaccgggcggtgttaagcgttcactgtcatgatgatttgggccttgcggtggccaatagtttagctgccatcaaaaacggcgcccggcaggtggaatgtaccattaacggaattggtgaacgggctggaaactgttccttagaggagattgtaatggctctttatacccgcaaagatgtattgcctttttataccggcattaaaaccgaggagatttaccggaccagtaagctcgttagcaatttaaccgggatgccggtacagcccaacaaagcgattgtagggaaaaatgccttttcccacgaatcggggattcaccaggatggggttttaaaggaaagaactacttatgaaataatgaatcccaggctggtgggtattcccgaatcccgtctggtactgggtaaacattcgggaagacatgcgttaaaggagaggttattagagcttggttatgaattaaccgaagagcagttgaatgaggcttttgttaaatttaaagctttagccgataagaaaaaagaagttaccgatcaggatttagaagcaatgatggaagaagaaataagaaaagttcccgaaacttacaccctggattatttccatatttctaccggttcaacgattattcccacggccacggtgggcttaatcaaggaaggggaaaaattagaagacgccgccaccggcgatggaccggtggatgccatttataaagctatcaataaaataaccggtttaactccggttttagagcaatattcaattaatgccgtaacttctggcgaagatgccctgggagaagtagtggtaaaactaaaaaatggcctcgggaaaattgtcaccggtcgcggagtttccaccgatattttagaagcatcggccaaggcttatttaaatggtatcaataaattactttttgattaccaggcgaaaggggagaagcagtaa

SEQ ID NO: 6854 - protein, 509 aa, Carboxydothermus hydrogenoformans Z-2901
MERVRIFDTTLRDGEQSPGVSLNAMEKLQIARQLQKLGVDVIEAGFPITSPGDKEAVSLIAREVKGVVVAALARASALDIETAWDAIKDAESPRIHTFIATSDIHLKYKLKMDRETVVERAVAAVKLAKKFTADVEFSAEDASRSDLDFLCRVVEAAVKAGATTINIPDTVGYAEPEEFGEFICKILEKVPVMDRAVLSVHCHDDLGLAVANSLAAIKNGARQVECTINGIGERAGNCSLEEIVMALYTRKDVLPFYTGIKTEEIYRTSKLVSNLTGMPVQPNKAIVGKNAFSHESGIHQDGVLKERTTYEIMNPRLVGIPESRLVLGKHSGRHALKERLLELGYELTEEQLNEAFVKFKALADKKKEVTDQDLEAMMEEEIRKVPETYTLDYFHISTGSTIIPTATVGLIKEGEKLEDAATGDGPVDAIYKAINKITGLTPVLEQYSINAVTSGEDALGEVVVKLKNGLGKIVTGRGVSTDILEASAKAYLNGINKLLFDYQAKGEKQ

SEQ ID NO: 6855 - DNA, 1572 bp, Carboxydothermus hydrogenoformans Z-2901
  CDS (1)..(1572): transl_table=11
atgaaggtttacctttatgatactactttaagggatggagctcaggcggaagggataaattataccgtttccgataaattaaaaattgccaggaaattaattgcctttggcattgattatttagaaggtgggtggccgggagcaaatcctaaagatttagagtttttccaggaagccaaaaagcttgattttaataaaactaagcttgcggcttttggttcaacccgccatccaaggctaaaagttaaggacgaccctaaccttctgaacctgataaaaagtgaagccccggtagttacggtatttggtaaatcatgggacttgcatgtagagagtgctctggctacaaccctggaaaacaaccttttaatggtgtacgaaacggttgcctttttaaaagaggttgggcgggaagtggtttttgatgcggaacatttttttgacggttttaaaaataatcccgagtatgctctcaaagttatcgaacaggccgccagggctggagccgatttcatagtattatgtgataccaacggtggaagtttgcccaaagagattcgggccggggtggaagcagctttaaaaattcacccccgtatcggtattcacgctcataacgattcggaactggcggtggccaacagtttaatagcggtggaaacgggagctactatggttcaggggacgattaacggctatggagaacggtgcggtaatgccaacctctgttccgtaattcctaaccttattttaaaaatgggagtggaggtaaattgtcaggataatttaaaaaacctgacccggctttcccgttatgtatcggagatagccaacctccatcccaatccctatcagccgtataccgggcagagcgcctttacccataaaggcggggttcatgccagtgcgctcttaaaggataagggtacttatgagcatattccgccggaactggtaggcaaccaccggaaagtttccatttccgaccaagccggagtttcaaaccttctttttaacagtgagaacctggggctatcggaagaagaggtaaaaacctatggtaaagaactggtggcggcaattaaggcgatggagcaccagggctaccagtttgaaggggccgaagcttctttggagcttttggttcgaaaagttacgggaaagctttcggaaccgtttaaaattgacaactccaagctgatcattgaaatcaaggaagatggccgggtcttatccgaagcggtggttaaagtccgggtgggggataccaccattcataccgcttccgatggcaacggtccggttaacgctttagataatgccttaaggaaagctcttttagaaatataccccaatctttcggagcttaagcttaccgactataaggtccgggtcttaaacgaaaaagccgggacggaggcggtggtgcgggtgttaattgaatcgtcagctggcgagaaaagtatcaacaccgtgggagtttccaccaatatcattgaagccagtttaaaagccctgaccgacagcttgatttactttttaatcaataacaatgaagggactgtttcttaa

SEQ ID NO: 6856 - protein, 523 aa, Carboxydothermus hydrogenoformans Z-2901
MKVYLYDTTLRDGAQAEGINYTVSDKLKIARKLIAFGIDYLEGGWPGANPKDLEFFQEAKKLDFNKTKLAAFGSTRHPRLKVKDDPNLLNLIKSEAPVVTVFGKSWDLHVESALATTLENNLLMVYETVAFLKEVGREVVFDAEHFFDGFKNNPEYALKVIEQAARAGADFIVLCDTNGGSLPKEIRAGVEAALKIHPRIGIHAHNDSELAVANSLIAVETGATMVQGTINGYGERCGNANLCSVIPNLILKMGVEVNCQDNLKNLTRLSRYVSEIANLHPNPYQPYTGQSAFTHKGGVHASALLKDKGTYEHIPPELVGNHRKVSISDQAGVSNLLFNSENLGLSEEEVKTYGKELVAAIKAMEHQGYQFEGAEASLELLVRKVTGKLSEPFKIDNSKLIIEIKEDGRVLSEAVVKVRVGDTTIHTASDGNGPVNALDNALRKALLEIYPNLSELKLTDYKVRVLNEKAGTEAVVRVLIESSAGEKSINTVGVSTNIIEASLKALTDSLIYFLINNNEGTVS

SEQ ID NO: 6857 - DNA, 1143 bp, Carboxydothermus hydrogenoformans Z-2901
  CDS (1)..(1143): transl_table=11
gtgaaattaaaagataaaccaatttatatcgttgatacgaccctaagagatggagaacaaaccgcaggagtagtttttgcaaataaggaaaaaattcgaattgcccagatgctggatgaacttggtgttgaccagattgaggccggtattcccacgatgggtggcgatgaaaaagaggcaattaccgccatctgtaaacttggactaaaagccagtatcatgggctggaaccgtccggtaattaaagatattgaagagtcgctgcgctgcggggtagatgcggttgctatatctatttctacctcggatatccatattgaacataaactccgggcctcccgggaatgggttattgaaaatatggttaaagcctgcgagtttgctaaaaaagaaggtttgtacgtttcggtgaacgctgaggatgccagccgctccgacatggaatttttagtgcagtttggtttggcggcgaaacaagcgggagccgaccgtttaagatattgcgataccgtgggtatccttgatccctttactacttatgaaagggtcaaggaattgcgggaaagagtaggtattgaaattgaaatgcatacccacaacgactttggcatggccacggccaatgctttagccggggttaaagccggagctaagtttgtaggggttacggttattggccttggagagcgggccggaaacgctgctttagaagaagtggtaatggccttaaaacatatttacggtatcgatcttggctttaagaccgagcttttccgggaagttgctctttatgtttccaaggcttccggccgggaacttcccgcctggaaagctattgtgggttccaacatgtttgcccacgaatcgggaatccatgccgatggagcgttaaagaatcctaaaacctacgaggctttccagcccgaagaagtgggtctggagcgacaaattgttatcggtaagcactccggttcggcagcgttaaaagcgaaatttgccgagtacggaattcacttaaccgatgaacaggcagcagagcttctaccccatgtccgggcccatgcggtggaattaaaacggtctttgtttgataaagagcttgttttaatctacgaagaacatttcggaaagcggggaatgtag

SEQ ID NO: 6858 - protein, 380 aa, Carboxydothermus hydrogenoformans Z-2901
MKLKDKPIYIVDTTLRDGEQTAGVVFANKEKIRIAQMLDELGVDQIEAGIPTMGGDEKEAITAICKLGLKASIMGWNRPVIKDIEESLRCGVDAVAISISTSDIHIEHKLRASREWVIENMVKACEFAKKEGLYVSVNAEDASRSDMEFLVQFGLAAKQAGADRLRYCDTVGILDPFTTYERVKELRERVGIEIEMHTHNDFGMATANALAGVKAGAKFVGVTVIGLGERAGNAALEEVVMALKHIYGIDLGFKTELFREVALYVSKASGRELPAWKAIVGSNMFAHESGIHADGALKNPKTYEAFQPEEVGLERQIVIGKHSGSAALKAKFAEYGIHLTDEQAAELLPHVRAHAVELKRSLFDKELVLIYEEHFGKRGM

SEQ ID NO: 6859 - DNA, 1623 bp, Synechococcus sp. CC9605
  CDS (1)..(1623): transl_table=11
atggccaaggaccccggtcgcgtcctgatttttgacaccaccctgcgggatggtgagcagtcgcccggggcgagcctcaacctggaggaaaaactggccatcgcccagcagctggctcggctcggcgttgatgtgattgaggcgggattccccttcgccagtcccggggatttcgccgccgtgcagcggatcgcccagcaggtgggtggcgacaacggcccgatcatctgcggcctggcccgtgcctcaagggccgacatcaaagcctgcgctgatgccgtggccccggcaccgcggcgccgcattcacaccttcatcgccaccagcgacatccacctcgagcacaagctgcgcaagagccgcggcgacgtgctcggcatcgttcccgagatggtgagctacgcccgttctctggtggaagacgttgagttctcctgtgaagacgccggccgcagcgacccggagttcctttatgaggtgattgaggcggcgattgctgccggcgccaccacgatcaacattcccgacaccgtcggctacacgacaccgtcggagttcggcgcgctgatcgcaggcatcaatcagcacgtgcccaacatcggcgaggcggtgatatcggtgcacggccacaacgatctcggcctggccgtggcgaacttcctggaggcggtcaagaacggtgctcgtcagctcgaatgcacgatcaatggcatcggcgaacgggccggcaatgcctcgctcgaggagttggtgatggcgctgcatgtgcggcggcgttactacaaccccttctttggccgggaggaagacagccccacgccgctcactgccgtgcgcactgaagagatcaccaagacctcacggctggtgtccaaccttaccggcatggtggtgcagcccaacaaggccatcgttggtgccaatgccttcgcccatgaatccggcatccaccaggacggcgttctcaagaaccggcttacctacgaaatcattgatgcccagaccgtgggcttgtccgacaaccgcatctccctcggcaagctgagcggccgcagtgccgttcgcgcccgtctggaggaactgggctacgacctcacccgtgaggatctcgatgaggccttcgcccgcttcaaggaactcgccgaccgcaagcgcgagatcactgaccgtgatctggaggcgatcgtcagcgaacaggtgcagcagccggaagcccgcttccagctcaagctggtgcaagtgagctgcggcagcagcctgcgccccaccgccaccgtcacccttttggatgaagagggcagtgagaccacaggctcggcggtgggcaccggtccggtggatgccgtctgccgtgccttgaatgatctggcgggtgtgcccaatgagttgatcgagttctcggtcaagtcggtcaccgagggcattgatgccatgggcgatgtgaccatccgcctgcgccgcaatggtgcgctctactccggtcacgcagccgacaccgatgtggtggtggcggcggggatggccttcgtgaatgccctcaatcgcctggtggctggcgaggagcgccagtcattgcatccgcagaaggatcctgttgttctggagagccgaccgacgctctag

SEQ ID NO: 6860 - protein, 540 aa, Synechococcus sp. CC9605
MAKDPGRVLIFDTTLRDGEQSPGASLNLEEKLAIAQQLARLGVDVIEAGFPFASPGDFAAVQRIAQQVGGDNGPIICGLARASRADIKACADAVAPAPRRRIHTFIATSDIHLEHKLRKSRGDVLGIVPEMVSYARSLVEDVEFSCEDAGRSDPEFLYEVIEAAIAAGATTINIPDTVGYTTPSEFGALIAGINQHVPNIGEAVISVHGHNDLGLAVANFLEAVKNGARQLECTINGIGERAGNASLEELVMALHVRRRYYNPFFGREEDSPTPLTAVRTEEITKTSRLVSNLTGMVVQPNKAIVGANAFAHESGIHQDGVLKNRLTYEIIDAQTVGLSDNRISLGKLSGRSAVRARLEELGYDLTREDLDEAFARFKELADRKREITDRDLEAIVSEQVQQPEARFQLKLVQVSCGSSLRPTATVTLLDEEGSETTGSAVGTGPVDAVCRALNDLAGVPNELIEFSVKSVTEGIDAMGDVTIRLRRNGALYSGHAADTDVVVAAGMAFVNALNRLVAGEERQSLHPQKDPVVLESRPTL

SEQ ID NO: 6861 - DNA, 1524 bp, Desulfovibrio desulfuricans G20
  CDS (1)..(1524): transl_table=11
atggctgacagattgtacattttcgacaccacgttgcgcgacggcgaacagtcgcccggcgccaccatgaacattcatgaaaaggtgcagctggcccgccagctggaaatggtcggtgtggacattatggaggccggctttccggctgccagcaaaggcgactttgaagctgtgaaaaccatagccgccaccgtgaaaaatgcacaggtcgccggtctgtgccgcgccgtgcagcccgacatcgaccacgcatgggcagccatcagaaacgcagcacatccgcgtattcacacctttatcgccacctcgccggtgcatatgcagtacaaactgcgcaaatcgcccgaacaggtgctggaaatggcgcgcgacgcagtgcggtatgccgcaggcctgtgctccaatgtggaattcagcgccgaagacgcatcgcgttccgactgggattttcttacccgcgttgtggaaaccgccattgacgccggtgccaccaccatcaacattcccgacaccgtgggctatgcacaaccggacgaattcggcgcactggtgcgttatgtcatggaaaacgcgcgcaacagccacaaggccgtcttttccgtccactgccacaacgacctcggtctggcggtggccaacacgctggccgcgctcaaagcaggtgcacggcaggcagaggtcaccgtatcaggcataggcgaacgtgccggcaacgccgcgctggaagaacttgtcatggccctgcggacacggcatgcttactacgacatggaaacaggaataaagtcagagcagcttttccctgcctgccgcctgctttccatgatcatcgggcagcccatacccgccaacaaagccattgtaggggccaacgcctttgcgcacgagtcaggcatccatcaggacggcatgctgaaaaaccgcgagacatacgaaataatgacgccggaatccgtgggtcgcaccaagacggaaatcgttctgggcaagcactcgggccgcaacgccatcaacggcaagcttgaagagctcggctaccgcctgactccggaacagacccagctggtgttcgatgccgtaaagaagctcgccgacaggaaaaaacagatctacgacgaagatatggaagcgctggtgcttgaagaggtgttccgcatacccgacatgttccggcttgtgcacctcagcgtgcaggccagcgatacgggagttcccccttccgccgccattgtcatggaagtgggcggcgaacgccgccagcacaccaccttcggcgtgggtcccattgacgcggtattcaatgccatatcacagatagtgggacgtgccccgcagctgcggcattattcggtcaacgccatcaccggcggcaccgacgcgcagggcgaggtaacagtcaagctgcaggaaaacggcagtgccgcggtaggccgcggtgccgatgctgatatcatcacagccagtgcaaaagcgtatctcaatgcgctgaacaggcttgccaaaaaagaacaggaggacaaatag

SEQ ID NO: 6862 - protein, 507 aa, Desulfovibrio desulfuricans G20
MADRLYIFDTTLRDGEQSPGATMNIHEKVQLARQLEMVGVDIMEAGFPAASKGDFEAVKTIAATVKNAQVAGLCRAVQPDIDHAWAAIRNAAHPRIHTFIATSPVHMQYKLRKSPEQVLEMARDAVRYAAGLCSNVEFSAEDASRSDWDFLTRVVETAIDAGATTINIPDTVGYAQPDEFGALVRYVMENARNSHKAVFSVHCHNDLGLAVANTLAALKAGARQAEVTVSGIGERAGNAALEELVMALRTRHAYYDMETGIKSEQLFPACRLLSMIIGQPIPANKAIVGANAFAHESGIHQDGMLKNRETYEIMTPESVGRTKTEIVLGKHSGRNAINGKLEELGYRLTPEQTQLVFDAVKKLADRKKQIYDEDMEALVLEEVFRIPDMFRLVHLSVQASDTGVPPSAAIVMEVGGERRQHTTFGVGPIDAVFNAISQIVGRAPQLRHYSVNAITGGTDAQGEVTVKLQENGSAAVGRGADADIITASAKAYLNALNRLAKKEQEDK

SEQ ID NO: 6863 - DNA, 1623 bp, Synechococcus elongatus PCC 7942
  CDS (1)..(1623): transl_table=11
atggccagcgcaagctcgaacgaccggattctcattttcgataccacgctccgggatggcgaacagtcacctggtgcaagcctaaacctagaagagaaactggcgatcgcgcgtcaactggctcgactgaatgtcgacattattgaggccggttttgcctttgctagtcccggtgattttgaagcggtgcagcgcattgccgctgaagtcggcacaccggatggccccacgatttgtagtttggcgcgggcaactcgtcaggatatcaaagcagcggctgaagccttggcaccggcagccaaaggccgcattcacacctttatcgccacttccgacatccacctcgagtacaagctcaagaaaactcgggctgaggttttggcggtcatccccgagatggttggctatgccgcttccttggtcgatgacgtcgaattttcgccggaagatgcggggcgatcggatcctgaattcctctatgagtgtttggaagcggcgatcgcggcaggggccaaaacgatcaatattcccgacaccgtcggctacacgactcctagcgagtttggagccttgattggcggcattaaacagaatgtctgcaacattgatcaggcaatcatttccgtccatggtcacaacgacttaggccttgctgtcgccaacttcctagaagcggtcaaaaacggcgcgcgccagctggaatgtacgatcaacggcattggcgaacgagctggtaatgcggctctagaagagctggtgatggccctgcatgtgcgtcgccaatacttcaatccgttcttgggacgcgctgcagattcagaagcacccctaacccaagtcaacactcgcgaaatctacaaaacctcgcgcttggtctcgaatctgactgggatgttggtgcagccgaataaagcgatcgtgggggccaatgcctttgcacatgaatcgggtattcaccaagacggcgtcctcaaaaataagctgacctacgaaatcgtcgacgccgaaacgattggcctaagtaccaatcgcattaccctcggtaagctgtcggggcgcaatgccttccgtacccgtttgcaggagttgggctacgaccttggcgaggacgacttgaaccgagctttcctgcgcttcaaggaactagccgataaaaagcgggaagtcaccgatcgcgacttggaagcgatcgtcaatgacgaaacccagcaagcacccgagctgttcaagctggaattggtgcaggtttcagcgggcgatcatgcgcgtcccaccgccaccgtcaccctacgcactcccgaaggggaagaactgactgacgcagcgatcggtacggggccggttgatgcgatttatcgagccatcaatcgtgtggtgaacatcccgaatgagctgatcgagttttcggtcaagtctgtcacagcagggattgatgcgatcggcgaggtcacgattcgtctgcgtcatgaagaccggattttctctggacattcggctaataccgacatcctcgtagcctcggcccaagcctatattcacgctctcaaccggcttgccgaagcgttgcagaaggataagcccttgcatccgcaagaaccgattgtcgctggtatgggtcgttag

SEQ ID NO: 6864 - protein, 540 aa, Synechococcus elongatus PCC 7942
MASASSNDRILIFDTTLRDGEQSPGASLNLEEKLAIARQLARLNVDIIEAGFAFASPGDFEAVQRIAAEVGTPDGPTICSLARATRQDIKAAAEALAPAAKGRIHTFIATSDIHLEYKLKKTRAEVLAVIPEMVGYAASLVDDVEFSPEDAGRSDPEFLYECLEAAIAAGAKTINIPDTVGYTTPSEFGALIGGIKQNVCNIDQAIISVHGHNDLGLAVANFLEAVKNGARQLECTINGIGERAGNAALEELVMALHVRRQYFNPFLGRAADSEAPLTQVNTREIYKTSRLVSNLTGMLVQPNKAIVGANAFAHESGIHQDGVLKNKLTYEIVDAETIGLSTNRITLGKLSGRNAFRTRLQELGYDLGEDDLNRAFLRFKELADKKREVTDRDLEAIVNDETQQAPELFKLELVQVSAGDHARPTATVTLRTPEGEELTDAAIGTGPVDAIYRAINRVVNIPNELIEFSVKSVTAGIDAIGEVTIRLRHEDRIFSGHSANTDILVASAQAYIHALNRLAEALQKDKPLHPQEPIVAGMGR

SEQ ID NO: 6865 - DNA, 1602 bp, Rhodospirillum rubrum ATCC 11170
  CDS (1)..(1602): transl_table=11
atgagcgataagcgcgtctatctttatgacagcaccctgcgcgatggggcgcagacccaaggtgtggatttctcggccaccgacaaggccgcgatcgcccgcgagttggatgccctgggcattgactatgtcgaaggcggctggcccggcgccaatccgaccgatgacgccttgttcgccaacccgccggttttgcggcgggcccgcctatcggcctttggcatgacccggcgttcggggcgcagcgccgaaaacgatcccagcctgcaggcgctgttctgtccgggggtgcgggtggtgaccatggtcggcaagacctgggatttccagtgcgaggtggcgatcggcgtgcctttggatgaaaaccgcaagatgatcgccgacagcatcgcccatgccgccgcccgtgtcgaagaagcggtgtttgacgccgagcatttcttcgacggctataaaagcaatcccgactatgccttatcgtgcgtgcgcgccgcctatgaggccggggcgcgctgggtggtgctgtgcgacaccaacggcggaacgctgccccatcagatcgaggcgatcgtcggcgccgtcgccgccgtcattcccggcgatcacctgggcatccattgccacaacgacaccgagaacgccgtggccaatagtctggccgccgtgcgcgccggcgcccgtcaggtccaaggcacgttgaacggcctgggcgagcgctgcggcaacgccaatctggtcagcatcattcccaatctgatgctgaagatgggctttgaaaccggggtgtccgagcacgacctgcgccatctgacccatgtgtcgcgcatgctcgacgagcggctgaaccgggcgcccaaccgcaatgccgccttcgtcggcgacagcgcctttgcccataaggggggcttgcatgtttcggcggtggaacgcgatccgcgctgttacgagcatatcgcccccgaaaccgtcggcaacgcccgccagatcctggtgtcgaaccagtccgggcggtccaatgtcatcgcccgtttccgcgagatcggtctggagatcgatcccggcgagcccaaggttaacgacctgcttgacgcggtgaagcgccgtgaatccgagggctacgcctatgacggcgccgaggccagtttcgagctgctggcccgccgggcgctggagggcgtgccggaatatttccgcctcaacagcttccgggtgatcgacgaacggcgctggaacgcgcgcggtcagttgatcacgctgtcggaagccaccatcaaggcggtggtccaggggcgcgactatatgaccgtggccgagggcaacggcccgatcaacgccttggacgcggcgctgcgcaaggttttgctgccggtctatccgcagctggcggatttgcggctggtcgattacaaggtgcgtatccttacccccgatgacgccacggcggccatcacccgggtgatgatcgaaagtgcggattcaaagggcgggcggtggaacaccgtcggggtgtcgggcaatatcatcgacgcctcttataacgccttgcacgattccttgacctataagctcttcaagggcgaacaggcatcgcgagcggcttga

SEQ ID NO: 6866 - protein, 533 aa, Rhodospirillum rubrum ATCC 11170
MSDKRVYLYDSTLRDGAQTQGVDFSATDKAAIARELDALGIDYVEGGWPGANPTDDALFANPPVLRRARLSAFGMTRRSGRSAENDPSLQALFCPGVRVVTMVGKTWDFQCEVAIGVPLDENRKMIADSIAHAAARVEEAVFDAEHFFDGYKSNPDYALSCVRAAYEAGARWVVLCDTNGGTLPHQIEAIVGAVAAVIPGDHLGIHCHNDTENAVANSLAAVRAGARQVQGTLNGLGERCGNANLVSIIPNLMLKMGFETGVSEHDLRHLTHVSRMLDERLNRAPNRNAAFVGDSAFAHKGGLHVSAVERDPRCYEHIAPETVGNARQILVSNQSGRSNVIARFREIGLEIDPGEPKVNDLLDAVKRRESEGYAYDGAEASFELLARRALEGVPEYFRLNSFRVIDERRWNARGQLITLSEATIKAVVQGRDYMTVAEGNGPINALDAALRKVLLPVYPQLADLRLVDYKVRILTPDDATAAITRVMIESADSKGGRWNTVGVSGNIIDASYNALHDSLTYKLFKGEQASRAA

SEQ ID NO: 6867 - DNA, 1179 bp, Rhodospirillum rubrum ATCC 11170
  CDS (1)..(1179): transl_table=11
atggattggtcatcggtcatcgtcaacgataccacgctgcgcgacggcgagcagaccgccggggtgatcttcaccctgggcgaaaaggtggcgatcgccaaggccctggagcgcgccggcgtgcccgagatggaagtcggcatcccggccatggggcccgaggagcaggagtcgatccgcgccgtcgtcgcccaatgcgaggccagccggccgatcgcctggtgccgcatgcatatgaccgaccttgacgcggcggcggcctgcggcgtcgatatggtcaatctgtcgatcccggtttccgaccagcagatcaagggcaagctgggccgcgatcgcggctgggtgctcgcccatctggagaccatgatcaagaccgccctggaaaaggggctggaggtcgccctgggcggcgaggattccagccgcgccgatcccgagttcctgcttcgggtgatcgaacgcgccgaagccagcggcgcccggcgcttccgcttcgccgataccctggggatcatggatcccttcaccaccttgcagatgttcaagcgcctgcgcgccgccagcggcctggaactggaaatccatgcccacgatgatctggggctggcgacggcgaattccctgggcgccgtgcttggcggggccacccatgtttcgaccaccgtcaatggcctgggcgagcgggccggcaacgccccccttgaagaggtggtgatggcctgccgcaatctgtatggccgccataccggcatcgcgccgatggccctggcggcggtctccaaactggtggccgaggcctcggggcggccggttccggcgaacaagccgatcgtcggcgaggcgatcttcacccatgaatcggggatccatgtcagcggcctgctgcgcgatcccaagaattacgaggcgttgtcccccgccgatctcgggcgttgccatcgtctggttctgggcaagcattcgggcgtcgccagcatcgttcacgcctgcaacgccctggggctggcccccggagaggcccaggcgcgggccatgctggcgcgcgtccgcctccatgccggggcgaccaagcgcccgccgacggacgccgatctgcgccgcttcttcgacgaaacccgctcggtggccgaggccatcgaaacccttgatttcagccgcccgccccaggcggcgagctga

SEQ ID NO: 6868 - protein, 392 aa, Rhodospirillum rubrum ATCC 11170
MDWSSVIVNDTTLRDGEQTAGVIFTLGEKVAIAKALERAGVPEMEVGIPAMGPEEQESIRAVVAQCEASRPIAWCRMHMTDLDAAAACGVDMVNLSIPVSDQQIKGKLGRDRGWVLAHLETMIKTALEKGLEVALGGEDSSRADPEFLLRVIERAEASGARRFRFADTLGIMDPFTTLQMFKRLRAASGLELEIHAHDDLGLATANSLGAVLGGATHVSTTVNGLGERAGNAPLEEVVMACRNLYGRHTGIAPMALAAVSKLVAEASGRPVPANKPIVGEAIFTHESGIHVSGLLRDPKNYEALSPADLGRCHRLVLGKHSGVASIVHACNALGLAPGEAQARAMLARVRLHAGATKRPPTDADLRRFFDETRSVAEAIETLDFSRPPQAAS

SEQ ID NO: 6869 - DNA, 1554 bp, Moorella thermoacetica ATCC 39073
  CDS (1)..(1554): transl_table=11
ttggcagataccggcaagcggatttatattttcgacacgacactgcgtgacggcgaacagtcgccgggggtaagcctcaatatccaggaaaagctggagattgcccgccagctggcccgcctgggggtcgatgttattgaagccggctttcccatcgcctcccccggggactttgaggccgtccgggccgtggctcgagaggtggagggaccggtcatcgccggcctggcccggattaacgaacgggatatcgaccgcgcctgggaggccctccaggaggcccaaaagccgcggatccacgtctttattgccacctccgatatccacctgaaatacaaactgcggatgagccggcaggaggtcctggaggctgtccggcggggagtggcccgggccaagggttactgccaggatattgagttttctccggaggatgctgtccggagcgacctggacttcctctgccaggtcctggccacggccattgaggccggggctaccgttcttaatatcccggataccgtgggctacgctaccccggaggagttcggccgtctgatcagccagatccggcagcgggtgccgggtattgataaagtccggatcagcgttcactgccataacgatctgggcctggccgtggccaactccctggcggccattgagaacggcgccctgcaggtcgagggggccatcaatggcattggcgaaagggctggaaatgccgccctggaggaagtgattatggccctttatacccggcgggattactacggctgccggacgggcatcgtcaccgaggagatctaccgcaccagcaaactggtcagtagcttgacgggtatgcccgtccagtacaataaagccattgtcggcaagaacgccttcacccatgaggccggcattcaccaggacggggtcttaaaagagcggactacctacgaaatcatgaatccggccatgatcggcctggtccagaataatattttcctgggcaagcactccggccgccacgccctgcgtagccgcctggaggaactgggctttaagctcacggaggccgagctggataaggccttcgcccgcttcaaagaactggccgaccgcaagaaagaaatcagcgaccgcgacctggaggccattgtcgagcacgaagtcaagcgcatcccggagaagtttgttctagagcatattcatatctccaccggcaaccgggttgtacccacagccaccatcggtatccgggtgggtgaagaattaaaggaagaggccgcctgcggtgaaggcccggtagacgccgccttcaaggccatagataagctgacccgcatcccggtttgcctcaaatcttacaatctcaatgccgtcaccggcggcaaggacgccgtcggtgaggtaacggtaaagattgagtacgatgggcgggtcttcataggtcgcggtatcagcaccgatgtcctggaagccagtgcccgcgcttacttgaacgccatcaataaggtggtttacgaggtaggggaagaaaacctgcagcaggccagtacggcccagtag

SEQ ID NO: 6870 - protein, 517 aa, Moorella thermoacetica ATCC 39073
MADTGKRIYIFDTTLRDGEQSPGVSLNIQEKLEIARQLARLGVDVIEAGFPIASPGDFEAVRAVAREVEGPVIAGLARINERDIDRAWEALQEAQKPRIHVFIATSDIHLKYKLRMSRQEVLEAVRRGVARAKGYCQDIEFSPEDAVRSDLDFLCQVLATAIEAGATVLNIPDTVGYATPEEFGRLISQIRQRVPGIDKVRISVHCHNDLGLAVANSLAAIENGALQVEGAINGIGERAGNAALEEVIMALYTRRDYYGCRTGIVTEEIYRTSKLVSSLTGMPVQYNKAIVGKNAFTHEAGIHQDGVLKERTTYEIMNPAMIGLVQNNIFLGKHSGRHALRSRLEELGFKLTEAELDKAFARFKELADRKKEISDRDLEAIVEHEVKRIPEKFVLEHIHISTGNRVVPTATIGIRVGEELKEEAACGEGPVDAAFKAIDKLTRIPVCLKSYNLNAVTGGKDAVGEVTVKIEYDGRVFIGRGISTDVLEASARAYLNAINKVVYEVGEENLQQASTAQ

SEQ ID NO: 6871 - DNA, 1599 bp, Syntrophus aciditrophicus SB
  CDS (1)..(1599): transl_table=11
atgactgaccggacagatgttttaatttatgatactaccctcagggacggcacccagggtgaaaagatcaatttttccgcagaagagaaagtgcgcatcgcccagcggcttgacgaaatgggctttcattacatcgaaggcgggtggccgggttccaatcccaaggacatgcgatttttcgaacttgggaaacacattccgttcaagaacgcacggctgacggcgtttggcagcacccgcagacccaatatcaaagtggaaaactgtgcaaatatccagacactgctggcggctgagacaccggccgttacaattttcggtaaatcctgggatcttcatgtcaccgatattctgacaattcctctggaagaaaacctggccatgatccatgagtccattgcatatctgaaggcgaacggcaaggaagtcatctatgacgcggagcactttttcgatggctacaagaaaaaccgtttctatgcgcttcagacgattgaaacggcatggaaggctggtgctgattttatcgtcctctgtgataccaacggaggaacgataccacatgaattgacggtaatcgtggaatatgtccgaagtttccttccagatgccccactgggcattcatgttcacaacgatggagaccttgctgtggctaactccattgccgccgtttctgccggcgcaaccatggtccagggcactatcaacggatatggcgagcgatgcggtaatgctgatcttattcccatcatcgccaatctccagcttaaaatgaaccggtggtgtctgccagacaactcgatccggcaactgaccaatctgtcgtattacatcagcgatgtggccaacattccgccgcagaattcaaggccctttgtagggcgcagtgcctttacccataaaggaggcgttcatgtcagcgcgatccttaaaaatcctgcggcatacgagcacatcaggccggaacttgtgggcaatgagcagcgcgtcctggtttctgatctctccggcaagagcaatatcgaatataaagcccgggaactcggaatcgatttggggaccgaagacgccatcagcaccctgatcgttcagaagatcaagatcatggaagacgaaggctatcaattcgacgctgcggacggatccctgtccctgctgatcaagaagatcaccggagaatttaaggaacctttcgtgctagagtgtttccatgttatcaatgccaaaacgaaaaacaacccttccctctcccaggcaacgatcaagatcgtcgtggggaatgaagaggaactgaccgccgcggaaggcaacggccccgtcaacgccctggacaatgccctgcgcaaagccctggtgaaattctacccgcagataagcgaagttcaccttgtggatttcaaggttagaactctggagggcgctgatggaacagccgccaaagtgagggttttactggactcgaaggacaacgaggatgtctggagcacgatcggcgtttccacaaatgtaattgaagcaagctggcacgccctggtggacagcattcagtacaagctctgcaaagataaaattaacaagcaccatgtgggagaataa

SEQ ID NO: 6872 - protein, 532 aa, Syntrophus aciditrophicus SB
MTDRTDVLIYDTTLRDGTQGEKINFSAEEKVRIAQRLDEMGFHYIEGGWPGSNPKDMRFFELGKHIPFKNARLTAFGSTRRPNIKVENCANIQTLLAAETPAVTIFGKSWDLHVTDILTIPLEENLAMIHESIAYLKANGKEVIYDAEHFFDGYKKNRFYALQTIETAWKAGADFIVLCDTNGGTIPHELTVIVEYVRSFLPDAPLGIHVHNDGDLAVANSIAAVSAGATMVQGTINGYGERCGNADLIPIIANLQLKMNRWCLPDNSIRQLTNLSYYISDVANIPPQNSRPFVGRSAFTHKGGVHVSAILKNPAAYEHIRPELVGNEQRVLVSDLSGKSNIEYKARELGIDLGTEDAISTLIVQKIKIMEDEGYQFDAADGSLSLLIKKITGEFKEPFVLECFHVINAKTKNNPSLSQATIKIVVGNEEELTAAEGNGPVNALDNALRKALVKFYPQISEVHLVDFKVRTLEGADGTAAKVRVLLDSKDNEDVWSTIGVSTNVIEASWHALVDSIQYKLCKDKINKHHVGE

SEQ ID NO: 6873 - DNA, 1215 bp, Desulfitobacterium hafniense Y51
  CDS (1)..(1215): transl_table=11
gtgaacggaaagtggtggacgaaggattggtgggtaagcgaatacaattaccacgaagaagtagtcaaggatttgcaccttccccaaaagattgagatacacgacgcgacgctgcgggatggggaacagactcccggcgtggtgttcagcaaagaggataaagtaagaattgcggaattgctggccgaagtgggagttgaccgggttgaggccggcatgccggcggtatccaaagatgatgcccaagcgattgaggagatcgccaaacgcaatttgggacccaagattatggtattctgccgggcgatgcgggaggatgtggatcgggccgtggattgcggagcaaatgggatcgttctggaagcgcccagcggctatccgaagcttaaatatcaatttgccagtaagtggacggaagaaagcctgaccgaagccgtcatcaataccatcaattacgccaaggaaaaggggctgtttgtcaactatttcccctttgatacgaccagagcggaacttccttttctcaagaggcttctgaccaatgtaacaactcaagccaaaccggattcggtaacggtggtcgataccacaggttcgatcactcccaccgccatgcgttttctggtcaggcaggtcagggaaaccatcgctctgcccctggaagttcatacccacaacgatttcgggctgggcacagccacgaccttcgccgcggtggaggaaggtgtgcaggtcgtgcacagctgcatcaacggtctgggcgagcggaccggaaatactgctctggaagagatagctctgggcttaaagctgctctatggcatagagctgcccaaattcaacttccagaaactgagtgagctttcccaggaagtgcaaaggatgtccggcaagaccctggcccaaaacaagccggtggtcgggctgctgccttttacccgggagattggcttgggaatgaaagttctggaagattacccgacggctgttttcccatttatgccggattttgtgggccaaaaaatgaaaatcgtcatgggcaagaagagcggcaaggaatctgttctgatgaagcttgaaggggcaggattaaaggccaatgaagagcaggtacaggaaattgttgcgcgcaccaaagctgccgggatcgccaaacgcaactggcttgaagacgaggagttcttggtgatcgcacgccaggtattggaccgttaa

SEQ ID NO: 6874 - protein, 404 aa, Desulfitobacterium hafniense Y51
MNGKWWTKDWWVSEYNYHEEVVKDLHLPQKIEIHDATLRDGEQTPGVVFSKEDKVRIAELLAEVGVDRVEAGMPAVSKDDAQAIEEIAKRNLGPKIMVFCRAMREDVDRAVDCGANGIVLEAPSGYPKLKYQFASKWTEESLTEAVINTINYAKEKGLFVNYFPFDTTRAELPFLKRLLTNVTTQAKPDSVTVVDTTGSITPTAMRFLVRQVRETIALPLEVHTHNDFGLGTATTFAAVEEGVQVVHSCINGLGERTGNTALEEIALGLKLLYGIELPKFNFQKLSELSQEVQRMSGKTLAQNKPVVGLLPFTREIGLGMKVLEDYPTAVFPFMPDFVGQKMKIVMGKKSGKESVLMKLEGAGLKANEEQVQEIVARTKAAGIAKRNWLEDEEFLVIARQVLDR

SEQ ID NO: 6875 - DNA, 1164 bp, Desulfitobacterium hafniense Y51
  CDS (1)..(1164): transl_table=11
gtggaggaaagaaaattaaccatcgtggacacgacattgcgggatggagaacagaccgcaggagtagtattttctaatcaggagaagctgatgattgcccggatgctggatgatctcggtgtccatcagattgaagccggggttccggtcatgggcggcgatgagcagaaggcaatccgtgatattgttaaaatgggtttgaaagccagtattatgggatggaaccgggcggtcatagccgatattgaaaagtccattgaatgtggatgcgatgcggtggctatatccatttccacctcagacattcatatcgaacataaactgatgaccacacgggaagacgttttggccagaatggtcaaggctgctgaatttgccaagagaaacgggctttacatatccgtgaatgcggaggatgcctcccgttccgatctggatttcctcctggaatttgctcgtcaggccaaagaggcgggggcagaccggcttcgctattgcgatacggtggggatccttgagcctttcacgacttttgaacgaattacgaagatcaaagaaaccatcgatatcgatgtggagatgcatactcataatgactttggtatggcaacggccaatgccttagccggtgtgaaagcgggagccagccatattggggtaacggtcaacggcttgggcgagcgggccggtaatgcagctttagaggaaattgtcatggccctgaagtatttggtcggagtcgatctgaaatttgccacagagcgatttgtcgaggtttcagaatttgtagcgagagcgtcaggacgttctgttcctgcctggaaggctatcgtgggcagcaatatgtttgcccatgagtcggggattcacgctgatggggctttgaaaaatcccctcacttacgaagtgtttaaaccggaggaagtgggcctggagcgccagattgtgattggcaagcactcgggaacttcggccatcaaagctaagttccgcaatgaatacggcaaagagatttccgaggaagaagccaatgagctgttggcccgggtaagagcttttgctgtggatatgaagcgctccctttttgataaggagctcatgtatatttacgaagatttgcatagggaagcggaaaatcgtcaacctaacccaaagtggttttaa

SEQ ID NO: 6876 - protein, 387 aa, Desulfitobacterium hafniense Y51
MEERKLTIVDTTLRDGEQTAGVVFSNQEKLMIARMLDDLGVHQIEAGVPVMGGDEQKAIRDIVKMGLKASIMGWNRAVIADIEKSIECGCDAVAISISTSDIHIEHKLMTTREDVLARMVKAAEFAKRNGLYISVNAEDASRSDLDFLLEFARQAKEAGADRLRYCDTVGILEPFTTFERITKIKETIDIDVEMHTHNDFGMATANALAGVKAGASHIGVTVNGLGERAGNAALEEIVMALKYLVGVDLKFATERFVEVSEFVARASGRSVPAWKAIVGSNMFAHESGIHADGALKNPLTYEVFKPEEVGLERQIVIGKHSGTSAIKAKFRNEYGKEISEEEANELLARVRAFAVDMKRSLFDKELMYIYEDLHREAENRQPNPKWF

SEQ ID NO: 6877 - DNA, 1548 bp, Saccharophagus degradans 2-40
  CDS (1)..(1548): transl_table=11
atgcaaaaagataagcttgttattttcgatacaacattgcgggatggcgaacaaagccccggcgcttccatgacgcaggaagaaaaaattcgcattgccaaaatgttggaaaaaatgcgtgtagacgtcattgaagcaggctttgcgatcgcaagcccaggtgattttgcagcagtaaaagccgtggcagaagcggtaaaagattcacgcgtatgcagcttggcacgcgctttagatggcgatatagacagagcggcagaggcattgaagggcgcgaatgcatcgcgtatccacacttttattgccacatcgcctattcatatgaagcataagctgaagatggagcccgatgcggtgttggcgcaagctattcacgccgtaaagcgcgcacgaagctataccgatgatgtggagttctcgttagaggacggcagtcgctctgagtttgattttatgtgtcgtataaccgaagcggcaattgctgccggtgcacgtactatcaatgtgcccgatacagttggctacggtgagccgggtgagtacggcgcaatgttcaagcgcttaattgaagcggttccaaattctgatttggccattttctctacccattgtcacaacgacttgggcttggctgtggctaattctttgtctgctgtaatgaacggcgtgcgccaaatcgaatgtaccattaatggtttgggggagcgtgcaggtaacgccgcgttagaagaggttgtaatggccgtgcgcacacgcaaagacctattcccagtagaaaccaatattgttacagagcacatagtgcctacctcgcgcttggtatccacaattaccggttttcctgttcagcccaacaaagccattgttggcgctaatgcgtttgcgcatgagtctggtatacatcaggatggtgtacttaagcatcgggaaacctatgaaattatgcgcgcggaagatgtgggctggaataccaataaaattgtattaggtaagcactctggccgcgctgctgtaaaagcgcgatttgaagatttaggtattacatttgataccccagaggcgttaagcgaagcgtttgcacgctttaaggcgctcgctgataaaaaacacgaaatttttgaccaagacttacaggcgttagtgtctgaagcagataatgctagccgtgaagaaaagtacaagctagtggctttagaggtagtgtgtaaaaccggtcagaacccccatgcgcaacttacgttaagtattggcggtgagttggtagaggcaagctccgaaggtggtggcccggtagatgcggcctataaggccattgaaagcgtggtaaatagccatacagaccttttactttactcggtgaataatatcactcagggcacagactctcagggtgaggtgacggtgcggttggagcgcaatggcaatattgtaaatggcataggtgccgataccgatattgtgacagcttctattaaatcctatttggatgccttgaacctgctcgaatctaataaatcccgcgcgcaccctcagcgtgaaggggtatga

SEQ ID NO: 6878 - protein, 515 aa, Saccharophagus degradans 2-40
MQKDKLVIFDTTLRDGEQSPGASMTQEEKIRIAKMLEKMRVDVIEAGFAIASPGDFAAVKAVAEAVKDSRVCSLARALDGDIDRAAEALKGANASRIHTFIATSPIHMKHKLKMEPDAVLAQAIHAVKRARSYTDDVEFSLEDGSRSEFDFMCRITEAAIAAGARTINVPDTVGYGEPGEYGAMFKRLIEAVPNSDLAIFSTHCHNDLGLAVANSLSAVMNGVRQIECTINGLGERAGNAALEEVVMAVRTRKDLFPVETNIVTEHIVPTSRLVSTITGFPVQPNKAIVGANAFAHESGIHQDGVLKHRETYEIMRAEDVGWNTNKIVLGKHSGRAAVKARFEDLGITFDTPEALSEAFARFKALADKKHEIFDQDLQALVSEADNASREEKYKLVALEVVCKTGQNPHAQLTLSIGGELVEASSEGGGPVDAAYKAIESVVNSHTDLLLYSVNNITQGTDSQGEVTVRLERNGNIVNGIGADTDIVTASIKSYLDALNLLESNKSRAHPQREGV

SEQ ID NO: 6879 - DNA, 1137 bp, Burkholderia xenovorans LB400
  CDS (1)..(1137): transl_table=11
atgtcgaatccgatcatcaacgacaccacgctgcgcgacggcgagcagacggccggcgtcgccttcacgattgccgaaaaatgcgcgattgccgaggcgctcgcacgcgccggcgtacccgaattggaaatcggtatccccgcgatgggtgacgaggaaatcgattgcatccagaccatcgtcgcgctgaatctcgacgccgatctgatggtctggggccgcctcaccgatgcggacctggcctcggcgctgcgctgcaatcccgacatcgtccacctgtcgattcccgtttccgatatccacctgcaacacaagctgcgccagccgcgctcatgggtattggcgcagatcaatcgcgtgatcggcgccgctgtcaggagcgggcgcaaggtttcgctgggcgcggaggatgcctcccgcgcggacccggctttcctcgccgacgtggcgcggcgcgcgcaacagtgcggcgcgcagcgcatccgctttgcggacacgctcggcgttctcgatccgttttcgacctatgaagcgatagcgcgattgcgcgacgcggtggatctggaaatcgaaatccacgcgcacaacgatctcggactcgcgaccgcgaacacgcttgccgcgctgcgcgccggcgcgacccacgccaatacgaccgtcaacggtctgggcgaacgggccggcaatgcggcactggaagaaatcgtgatgggcgtgcgccatatcatgggccgcgataccgccgtcgacacgaccgcgttgctgggcatctcgcgtctcgtcgaacgggcttcgggacgcccggtcgcgttgaacaagagcattgtcggcggcggcgtattcacgcacgagtcgggcatccacacagacgggctcgccaagaatgcctcgacttacgagagcttcgaccccgccgaactcggccgcgagcgctcggtcgtgctcggcaagcattcgggttcgcaaagcgtgcgccaggcttatgacgcgctcggcctgccggtcagcgacacgcttgtcgcgttgctgctcacgcgcatccgccaccatgcgacccatcacaagcaggcgcccagcgccgccgacctgtatcgcttcctgatcgaagcgcgcgacaccgtgggagagttgtcgtga

SEQ ID NO: 6880 - protein, 378 aa, Burkholderia xenovorans LB400
MSNPIINDTTLRDGEQTAGVAFTIAEKCAIAEALARAGVPELEIGIPAMGDEEIDCIQTIVALNLDADLMVWGRLTDADLASALRCNPDIVHLSIPVSDIHLQHKLRQPRSWVLAQINRVIGAAVRSGRKVSLGAEDASRADPAFLADVARRAQQCGAQRIRFADTLGVLDPFSTYEAIARLRDAVDLEIEIHAHNDLGLATANTLAALRAGATHANTTVNGLGERAGNAALEEIVMGVRHIMGRDTAVDTTALLGISRLVERASGRPVALNKSIVGGGVFTHESGIHTDGLAKNASTYESFDPAELGRERSVVLGKHSGSQSVRQAYDALGLPVSDTLVALLLTRIRHHATHHKQAPSAADLYRFLIEARDTVGELS

SEQ ID NO: 6881 - DNA, 1548 bp, Burkholderia xenovorans LB400
  CDS (1)..(1548): transl_table=11
atgtccgacaaactgatcatattcgacaccacgttgcgagacggcgaacaatcgcctggcgcatcgatgacgaaagaagaaaaaatccgtatcgcgaagcaactcgaacggatgaaggtggacgtgatcgaagcaggcttcgcggcaagctcgaacggcgacttcgattcgatccataccatcgcgggcctgatcaaggacagcacgatctgctcgctggcccgcgcgaacgacaaggacattcagcgcgcggccgacgcgctcaaaccggccgaccgcttccgcattcacacgtttatcgcaacttcgccgctgcacatggaaaagaagctgcgcatgacgccggaccaggtgttcgagcaggcgaagctggcagtgcgtttcgcccgcaaattcaccgacgacgtcgagttttcgccggaagacggcagccgctcggacatggactttctgtgccgcgtgctggaagccgtgattgccgaaggcgcgactaccatcaatatcgcggatacggtcggctacggcgtgccggagctgtacggccagctcgtgaaaacgctgcgcgagcgcattccgaactcgcataaagccgtgttctcggtgcattgccacaatgacctcggcatggcggtggcgaattcgctggccggcgtgcagatcggcggcgcgcgccaggtcgagtgcacgatcaatggccttggcgagcgcgcgggcaacacgtcgctcgaagaaatcgtcatggccgtgaagacccgcagggattacttcgggctcgatgtcggtctcgataccacgcagatcgtgccggcttcgaaactggtgtcgcagatcaccggtttcgtcgtgcagccgaacaaggcggtggtcggcgcgaacgcgttcgcccatgcttcgggcatccaccaggacggcgtgctgaaggcgcgcgacacctacgaaatcatgcgcgccgaggacgtgggctggagcgcgaacaagatcgtgctcggcaagctgtcgggccgtaacgcgttcaagcagcgtttgcaggaactgggcattgcgctggatagcgaaggcgagttgaacacggcgttcgcgcgcttcaaggaactggccgaccgcaagtcggaaatcttcgacgaagacatcatcgcgatcgtcacggaagaatccgccgaggcgcaggagaaagagcactacaagttcctgtcgctgtcgcaacattcggaaaccggcgagcagccgcacgcgaagatcgtgttctccgtcgaaggcaaggaagtgaccggtgaggcgcgcggcaacggcccggtcgacgccacgctgaacgcgatcgaaacggaagtggggagcggttcggaactgctgctgtactcggtgaacgcgatcaccaccggcacgcaggcacaaggcgaagtgaccgtgcgtttgtcgaagagcgggcgcatcgtcaacggcgtgggcacggatccggatatcgtcgcggcttccgcgaaagcgtatatctccgcgctcaacaagctgtattcgaacgtggacaagttgaatccgcaacgttcggagtga

SEQ ID NO: 6882 - protein, 515 aa, Burkholderia xenovorans LB400
MSDKLIIFDTTLRDGEQSPGASMTKEEKIRIAKQLERMKVDVIEAGFAASSNGDFDSIHTIAGLIKDSTICSLARANDKDIQRAADALKPADRFRIHTFIATSPLHMEKKLRMTPDQVFEQAKLAVRFARKFTDDVEFSPEDGSRSDMDFLCRVLEAVIAEGATTINIADTVGYGVPELYGQLVKTLRERIPNSHKAVFSVHCHNDLGMAVANSLAGVQIGGARQVECTINGLGERAGNTSLEEIVMAVKTRRDYFGLDVGLDTTQIVPASKLVSQITGFVVQPNKAVVGANAFAHASGIHQDGVLKARDTYEIMRAEDVGWSANKIVLGKLSGRNAFKQRLQELGIALDSEGELNTAFARFKELADRKSEIFDEDIIAIVTEESAEAQEKEHYKFLSLSQHSETGEQPHAKIVFSVEGKEVTGEARGNGPVDATLNAIETEVGSGSELLLYSVNAITTGTQAQGEVTVRLSKSGRIVNGVGTDPDIVAASAKAYISALNKLYSNVDKLNPQRSE

SEQ ID NO: 6883 - DNA, 1170 bp, Methanococcoides burtonii DSM 6242
  CDS (1)..(1170): transl_table=11
atggcaaatactgattattctaaaaatgaactaatgaacttcattgatcagagtcctcttgatatcgagatatgtgatgttacattaagagatggcgaacaaactcctggtgttgcttttacaagagatgaaaaaatcgaccttgcccttgaacttgattctatcggcgttgaggtcattgaagctggttttccagtagtctcgacttcggagaaagatattgtcaaggagatcagcaatttgggacttgatgccagcatctgctgccttgcacgctctgtcatagatgatgtcgatgcagctatcgattgcgatgttgatattgtcagcatattcattgctatgtcagatcttcatttaaagttcaaataccacaaaagctgtgctgatgttttcagttgcgcgatgggtgctatcgagcatgcaaaggatcacggtctcaaggtaaggtttgccgctgaggatgccacaaggactaatattgagaccctcaaaagggcctttctggcagcagaagattatcatgtggactatgtgagcattgctgataccattggtatattgagtccggctacaacacactatcttgtcagtgagatcaagaaggtcgttcatacacctatctgtatccactgccacaatgatcttgggatggcgaccgcaaatacgctggttgctgctgaagctggtgcaaaacaattacatacaactattaacggcatcggtgagcgtgcaggtaatgcatctcttgaggagctgctggtggcattgagggtacagcatggtattgaaacgtatgatacgaccaaactgaacagcatttcccggaaactcgaggaatattcaggccttcccacagctgttaataaagctgttgttggaaaatatgcgtttacacatgaatctggtattcatgtaatggcaattcttgaagaaccaaggacctatgaacttttcactcctgagatggttggtggcaaacgcaatcttgttgttggcaaacatactggtaaaaaggctttgaaaggtattgtaaatgatcttggatatgagcttgacaatgatgaattatgcgaattgattaacaaagtaaagaactgtactgaggtaaaaaaaggtatttcaagggaaaggcttgaggaaatgatccgcaatgtgcagtcacattga

SEQ ID NO: 6884 - protein, 389 aa, Methanococcoides burtonii DSM 6242
MANTDYSKNELMNFIDQSPLDIEICDVTLRDGEQTPGVAFTRDEKIDLALELDSIGVEVIEAGFPVVSTSEKDIVKEISNLGLDASICCLARSVIDDVDAAIDCDVDIVSIFIAMSDLHLKFKYHKSCADVFSCAMGAIEHAKDHGLKVRFAAEDATRTNIETLKRAFLAAEDYHVDYVSIADTIGILSPATTHYLVSEIKKVVHTPICIHCHNDLGMATANTLVAAEAGAKQLHTTINGIGERAGNASLEELLVALRVQHGIETYDTTKLNSISRKLEEYSGLPTAVNKAVVGKYAFTHESGIHVMAILEEPRTYELFTPEMVGGKRNLVVGKHTGKKALKGIVNDLGYELDNDELCELINKVKNCTEVKKGISRERLEEMIRNVQSH

SEQ ID NO: 6885 - DNA, 1161 bp, Cytophaga hutchinsonii ATCC 33406
  CDS (1)..(1161): transl_table=11
atgggaaagagaattttcgttttcgacacaacacttagagatggtgaacaggtccctggttgtcaattgaacactgaggaaaaaatcatcgttgcgaaagcgttggacgaattaggtgtcgacgtaatcgaagcaggtttcccggtttcaagcccaggagactttaattcagttgtagaaattaccaaagcagtaacgcgccctactatttgcgcacttacacgtgccaaagaagcggacatcaatattgccggtgaagccctgcgttttgcaaagcgcagccgtattcatacaggtattggcagttcggatattcatattgaacataaacttcgttctacccgtgaaaacattcttgaaatggctgtagctgctgtaaagcaagcgaagaaggttgttcatgaagttgagttcttctgcgaagatgcaggccgcgcagatcaggcattccttgcacgtatggttgaagcggtaattgaagcaggtgcagacgtagtaaacattcccgatacaacaggctatatgttgccatggcagtatggtgagcgtatcaaatatttgatggacaatgtatcaaatattgataaagctattttatctgcgcattgccacaacgatttagggttggcaacagctaattctcttgcagccttacaaaacggtgcacgtcaggttgaatgtacaatcaacggtatcggtgaacgtgccggtaatacagcacttgaagaagtagtaatggcgatggaatgtcacaaagagacgttaggccttgagacaggaatcaatcataagaaattggttccgatcagtcatttggtatccacgttgatgcgtatgcaggttcaatcaaacaaagcaattgttggcagaaatgcatttgcacactcttcaggtattcaccaggatggtttcttaaagcaccgtgaaacatacgagatcattgatccggctgctgttggagcagattcttcttcgatcattcttactgcacgcagcggacgtgcagcattgaatcaccgtttggcaacaatcggttacatgttgtctaaagatcaattggatcaggcatatacacagttcctggatatggccgatcatttgagaaaagtcgaagacgaaaacttacacgaattaatgcgtggtaaagtttacgcgaaataa

SEQ ID NO: 6886 - protein, 386 aa, Cytophaga hutchinsonii ATCC 33406
MGKRIFVFDTTLRDGEQVPGCQLNTEEKIIVAKALDELGVDVIEAGFPVSSPGDFNSVVEITKAVTRPTICALTRAKEADINIAGEALRFAKRSRIHTGIGSSDIHIEHKLRSTRENILEMAVAAVKQAKKVVHEVEFFCEDAGRADQAFLARMVEAVIEAGADVVNIPDTTGYMLPWQYGERIKYLMDNVSNIDKAILSAHCHNDLGLATANSLAALQNGARQVECTINGIGERAGNTALEEVVMAMECHKETLGLETGINHKKLVPISHLVSTLMRMQVQSNKAIVGRNAFAHSSGIHQDGFLKHRETYEIIDPAAVGADSSSIILTARSGRAALNHRLATIGYMLSKDQLDQAYTQFLDMADHLRKVEDENLHELMRGKVYAK

SEQ ID NO: 6887 - DNA, 1623 bp, Synechococcus sp. CC9311
  CDS (1)..(1623): transl_table=11
atggccaaggatccaggtcgcgttttgatcttcgacaccactcttagagatggtgaacaatccccaggggccagcctcaaccttgaggagaagcttgcgattgcgcagcaactggcccgtcttggtgttgatgtcatcgaggctggattcccgtttgcgagccctggtgatttcgctgctgtgcagcgcattgcccagcaggttggtggtgagaatggcccgatcatctgtggtttggcccgtgcctcccgcggcgacatcaaggcctgcgctgatgccgtcgctccggccccaaagcaacgcatacatacatttattgccaccagcgacatccatctcgaacacaagttgcgaaagagccgtaaagatgtgctcggcatcgttccagagatggttgcctacgcccgctcttttgtagacgacgttgaattttcatgtgaagacgcggggcgcagcgaccctgagtttttgtatgaagtgatcgaagcggccatctctgctggtgctagcaccgtgaacattccagatacggtgggctacaccacaccgactgaattcggccgcttgattgagggcattaatcgaaacgtgcccaacatcgatgaagcggtgatttcggttcatggccataacgatcttgggctggcagttgcaaacttcctcgaggctgttaagtcaggtgcgcgtcagttggagtgcacggtgaatggcatcggcgaacgcgccggtaacgccgctttggaagagttggtgatggcgatgcatgtacgccggcgctatttcaatcctttctttggacgtgatgaggattcaccaaccccgctcactgcagtccgtacggaggaaatcacgaagacctcgcgcctggtctccaatctcaccggcatggtggtgcaacccaataaggcgattgtgggtgccaatgcgttcgcgcatgaatctggcatccatcaagacggagtgctgaaaaaccggctcacctacgaaatcgttgatgcgcgcaccgttgggctcaccgacaatcggatctcgctgggcaagctcagcggccgaagcgctgttcgggctcggctcgaagagctcggctatgacctcagccgtgaggaccttgatgatgcctttgctcgcttcaaggatcttgctgatcgcaagcgggaaattacggaccgcgatctcgaatcgatcgtcagtgttcaggtgcaacaacccgatgccaagtaccagctcaagctggtgcaggtgagctgcggcagcagtcttcagcccacagcgactgtgacactcgccgatgagaatggccaggagcaaacagcagcctctgttggcaccggaccggtggatgctgtttgtcgttccctcaaccaactggcaggagagcccaatgaattggtggagttttctgtgaagtcggtgacggaaggcattgatgccatgggtgatgtcaccattcgtctgcgtagagacggccaactctattccggtcattccgcgcatacggatgtggtggtggccgccgctgaggcttttgtgaatgctctgaatcgtcttgttgcaggaacagcaggaccaaccattcatccgcaactggatatggctcagctggattcaagccctgttcattaa

SEQ ID NO: 6888 - protein, 540 aa, Synechococcus sp. CC9311
MAKDPGRVLIFDTTLRDGEQSPGASLNLEEKLAIAQQLARLGVDVIEAGFPFASPGDFAAVQRIAQQVGGENGPIICGLARASRGDIKACADAVAPAPKQRIHTFIATSDIHLEHKLRKSRKDVLGIVPEMVAYARSFVDDVEFSCEDAGRSDPEFLYEVIEAAISAGASTVNIPDTVGYTTPTEFGRLIEGINRNVPNIDEAVISVHGHNDLGLAVANFLEAVKSGARQLECTVNGIGERAGNAALEELVMAMHVRRRYFNPFFGRDEDSPTPLTAVRTEEITKTSRLVSNLTGMVVQPNKAIVGANAFAHESGIHQDGVLKNRLTYEIVDARTVGLTDNRISLGKLSGRSAVRARLEELGYDLSREDLDDAFARFKDLADRKREITDRDLESIVSVQVQQPDAKYQLKLVQVSCGSSLQPTATVTLADENGQEQTAASVGTGPVDAVCRSLNQLAGEPNELVEFSVKSVTEGIDAMGDVTIRLRRDGQLYSGHSAHTDVVVAAAEAFVNALNRLVAGTAGPTIHPQLDMAQLDSSPVH

SEQ ID NO: 6889 - DNA, 1569 bp, Shewanella sp. MR-7
  CDS (1)..(1569): transl_table=11
atgtctaacagagtaattatatttgataccaccttacgtgatggcgagcaggcgttagcggcaagcctgtcggtcaaagaaaagttacagatcgccatggcgttagaacgtctcggtgtggatgtgatggaagtggggttccctgtgtcgtcacccggtgattttgagtcggtgcagaccattgcccgtaccatcaaaaatagccgtgtatgcgccttatctcgcgcacttgaaaaggacatcgatgccgccgctcaggcattatccgttgccgaacagttccgtattcatacctttatctccacctccactatccatgtggagagcaagttaaagcgctcattcgagcaagtgttggagatggcggtaggcgcggtgaaatatgcccgtaggtttaccgatgatgtggagttttcctgcgaagatgcgggacgcacgccaatcgataatctgtgccgtatggtggaagcggcgattcatgctggcgctcgcaccatcaatatcccagataccgtgggttacacagtgccaagcgagtttggtggcattattcaaaccctgtttaatcgcgtaccgaatatcgaccaagccattatttcggttcactgccacgatgacttaggcatgtcggtagccaattcgattaccgccgtgcagcatggcgcccgccaaatcgaatgtaccatgaacggtattggtgagcgtgcgggtaactgctccctagaagaaatcgccatgatcttagcaacgcgtaagaatctgttgggagttgaaactgggatcaatgctaaggagatccaccgcacgtcgaatctagtcagccagttatgcaatatgccgatccagtcgaataaggcgattgtgggggccaatgcctttactcactcttcaggtattcaccaagatggcatgttaaaggcgcaaaatacctatgaaatcatgacgccagagagtatcggcctaaaccgaaacaacctgaatatgacctcgcgctccggccgccatgtgattaagcatcgcatggaggaaatgggctacagtgagcagaattacaatctggacgccctctacgaacagtttttacatttggcggataaaaagggccaagtcttcgattacgacttagaagccttagcctttatggaagcgcaagcggcggaagataacttctatcaattacagcagttagtggtgcagtccgactccaccgaaggcgttgctacggcaacagtgcgcatcgatgtcggcggtgaaattaaaaccgaagccgcgaccggtaatggtcccgtcgatgccgcctataacgccattgcccgtgcgacggaccgtcgtatcgatatcatcagctacaaattgagcgccaagggcgaggggcaaaatgccttgggccaagtcgacattaccgcggtttaccatgagcaaaatttccacggtgtcgggttagcgaccgacgtggttgaggcatcagcccgtgcgttagtgcatgtgatgaacctgacatgccgcgccgataaggtcgcagattacaaacagaatatgcataaaaacagagagctgggcggcgtatag

SEQ ID NO: 6890 - protein, 522 aa, Shewanella sp. MR-7
MSNRVIIFDTTLRDGEQALAASLSVKEKLQIAMALERLGVDVMEVGFPVSSPGDFESVQTIARTIKNSRVCALSRALEKDIDAAAQALSVAEQFRIHTFISTSTIHVESKLKRSFEQVLEMAVGAVKYARRFTDDVEFSCEDAGRTPIDNLCRMVEAAIHAGARTINIPDTVGYTVPSEFGGIIQTLFNRVPNIDQAIISVHCHDDLGMSVANSITAVQHGARQIECTMNGIGERAGNCSLEEIAMILATRKNLLGVETGINAKEIHRTSNLVSQLCNMPIQSNKAIVGANAFTHSSGIHQDGMLKAQNTYEIMTPESIGLNRNNLNMTSRSGRHVIKHRMEEMGYSEQNYNLDALYEQFLHLADKKGQVFDYDLEALAFMEAQAAEDNFYQLQQLVVQSDSTEGVATATVRIDVGGEIKTEAATGNGPVDAAYNAIARATDRRIDIISYKLSAKGEGQNALGQVDITAVYHEQNFHGVGLATDVVEASARALVHVMNLTCRADKVADYKQNMHKNRELGGV

SEQ ID NO: 6891 - DNA, 1173 bp, Leuconostoc mesenteroides subsp. mesenteroides ATCC 8293
  CDS (1)..(1173): transl_table=11
atggcaagcaaagtaactttttatgacacaacaatgcgtgatggtgaacaaacaattggggttaacttttcaattgaagaaaagattgaaatagcaaaaggattggatgattatggcgttgcagcaattgaagcgggatttcctgcggcttctcagaaagactttgaagaagtgaaaagaattgcagaagttgtggataacgcaaaagttgtcggtttggcacgaatggtcagaaatgatattaatgcggttattgaggcaaccaaggatgcaaaacatccaatgattcatgtgttcattgcaacttcaccaattcatcgtgagtttaaattacacatgaccaaagcagaaattttggacaaaatcaaagcagacgttacttttactaagcaacatatgcaagatattgtattctcacctgaagatgcgacacgaactgaacctgattttttggtagccagcgtgcaaacagctattgacgctggagcaacaatgattaacataccagacacagttggttatgatacgccagaagaatacggtgaagtttttgaaaacttgcgtcaaaatattgttggttttgacacagttggttggtcaacacatacacataatgatttgggtatggcaacggctaatgctttggcaggcattgagcatggtgcgacggaaattcaaggtacaatcaacgggattggtgaacgtgccggaaacgttgatatgattgaagcagcagcagctattcatgtgcgtcatgaaaagtttaatgcagaaacagatattgtcttagctcagtcaaaagccatttctgacattgtcgcacgcgcaacccgcatgccagttgcgggtaataaacccattatgggacgcaatgcctttgctcatgaatctgggattcatcaggatggttacttaaaaaatccagaaacttatgaaattttgaagccagaaatggttggtgctacggcatccctacctctggggaaattgtcgggatcgcatgcggtaatgtcaaaactaaatagcctaggttatgaggtgactcgtgatgatatgaaatcaattttcccaatctttaaatcagttgccgaagagtctgatttgattacagatgatcaattaaaggttattatgcaagtcgttgaagaaaaagaaatggtgagttatcaataa

SEQ ID NO: 6892 - protein, 390 aa, Leuconostoc mesenteroides subsp. mesenteroides ATCC 8293
MASKVTFYDTTMRDGEQTIGVNFSIEEKIEIAKGLDDYGVAAIEAGFPAASQKDFEEVKRIAEVVDNAKVVGLARMVRNDINAVIEATKDAKHPMIHVFIATSPIHREFKLHMTKAEILDKIKADVTFTKQHMQDIVFSPEDATRTEPDFLVASVQTAIDAGATMINIPDTVGYDTPEEYGEVFENLRQNIVGFDTVGWSTHTHNDLGMATANALAGIEHGATEIQGTINGIGERAGNVDMIEAAAAIHVRHEKFNAETDIVLAQSKAISDIVARATRMPVAGNKPIMGRNAFAHESGIHQDGYLKNPETYEILKPEMVGATASLPLGKLSGSHAVMSKLNSLGYEVTRDDMKSIFPIFKSVAEESDLITDDQLKVIMQVVEEKEMVSYQ

SEQ ID NO: 6893 - DNA, 1542 bp, Magnetococcus sp. MC-1
  CDS (1)..(1542): transl_table=11
atgtctgaaaatcgcattgtaatctttgatacaaccttgcgggatggtgaacagtctcccggttgctccatgaatgtggaagagaaactgcgtattgccagacagcttgagcggcttaaagtggatgtgatcgaggcgggttttcccattgcctcccccggtgattttattggggtaaaaaccgtcgcggataccattaaggagtgtcaggttgcgggtctctgtcgtgcgaaagataccgatattgatcgcgcctgggaggccctacagggtgcggtcgatccccgtattcacacctttattgccaccagtcccatccatatgcagcataaattgcgcatggaacccgacgaggtgattgaggcggcggtggcggcggttaaacgggccaagtcccacaccagcaatgtggagtggtcggcggaggatgcgggacgtaccgagccagattttctgtgccggattgtcgaagcggtgattgcggcgggggctaccacggttaatattcccgatacggtgggttacaccttgccccacgaatatggggagcgtattcgcaccctctgtgagcgggtgcccaatattcataaggcgatcatctcggtacactgccacaacgatttgggcttggcggtggccaactcgctctcggcggtgatcaatggggcgcggcaggtggagtgtaccatcaatggtttgggggagcgggcgggcaatgcctcgttggaagaggtggtgatggccctgcgcacccgcaaggatattttaccctacagctgtggggtggataccaccgagattatgcgcagctctaaactggtctcctcggtgacgggttttccggtgcagcccaataaagccattgtgggggccaatgcctttgcccatgagtcgggtattcatcaagatggtgtgctgaaaaaggccgatacctacgagattatgacccccgcctcggtggggttgagcaccaaccgtatggtgctgggtaaacattcgggacggcacgccttcaaagagcggctgaagagtttgggccacgatctggacaatgaacaactcaagcgtgcctttgaacgctttaaggagttggccgataaaaagcatgagctgtttgatgaagatctggaagtgctggtggatgaagagatgtaccggcattttggcgcctattataaactgacacggctacatgtggcgagtggtacgcgggatacgccggtggcggtggttcaggttgagtataatggcgaagagagcatgcacagcgcctggggcaagggctcggtggagtcggtctttaatgcgctgcgtaaattgattcccgaggccgccgaggctgaggtgctgctctatcaggtgcgggcggtgaccgaggggattgatgcccagggtgaggtgacggtgcgtttgcgtttgggcgaatccattgtgcaggggcagggggcggataccgatattattattgcttcggcccatgcctttatcaacgccctgaacaaggcggcttatcagcggcataagccgggtaaaggggtttaa

SEQ ID NO: 6894 - protein, 513 aa, Magnetococcus sp. MC-1
MSENRIVIFDTTLRDGEQSPGCSMNVEEKLRIARQLERLKVDVIEAGFPIASPGDFIGVKTVADTIKECQVAGLCRAKDTDIDRAWEALQGAVDPRIHTFIATSPIHMQHKLRMEPDEVIEAAVAAVKRAKSHTSNVEWSAEDAGRTEPDFLCRIVEAVIAAGATTVNIPDTVGYTLPHEYGERIRTLCERVPNIHKAIISVHCHNDLGLAVANSLSAVINGARQVECTINGLGERAGNASLEEVVMALRTRKDILPYSCGVDTTEIMRSSKLVSSVTGFPVQPNKAIVGANAFAHESGIHQDGVLKKADTYEIMTPASVGLSTNRMVLGKHSGRHAFKERLKSLGHDLDNEQLKRAFERFKELADKKHELFDEDLEVLVDEEMYRHFGAYYKLTRLHVASGTRDTPVAVVQVEYNGEESMHSAWGKGSVESVFNALRKLIPEAAEAEVLLYQVRAVTEGIDAQGEVTVRLRLGESIVQGQGADTDIIIASAHAFINALNKAAYQRHKPGKGV

SEQ ID NO: 6895 - DNA, 1605 bp, Magnetococcus sp. MC-1
  CDS (1)..(1605): transl_table=11
atgtccgctcaagcgcacccccctgttgttctctatgataccactctgcgtgatggctctcagagcgaggatgtgctcttttctgccgaagataaattgcgcattgccaagcgtttggatgcgcttgggttggactatatcgagggtggctggcccggtgctaatcctaaggatgatgactttttccggcaggctaaacagctcaagctgcaaaaaagccgcattaccgcctttggttccacccgccgggccgggtctaaggtggaagaggatcaggttatcaagggtctgttggggtcgggtgcgcaggtgattacggtgtttggcaaaagttgggatctgcatgtttcccgcgctttgggcatccccctggcacaaaatttagagttaatttttgataccattcgctatctcaaacggcatgtggatgaggtgttctatgatgcagagcacttttttgatggctatcggcgtaatccagaatatgcccgccagaccctgcaagccgcctatgagggcggtgccgacgcactggttttgtgcgacaccaatggcggcacgatggttgaagatttacgccgcatgatcggcgaggtgacggatctgggcgcaccattgggcatccattgccacaacgattgtgagctggcggtagccaactccttggcggcggtggaggccggtgtcacccatattcagggcaccattaatgggattggggagcgctgtggcaacgctaatttgatctccattatcccgaatcttaaatttaaaatgcagcgcagcttaaccttggacgatgaggatcttacccaacttacggcggtgagccgttttgttaatgaaatggccaaccgtcccacccagaaaaatcaaccctatgtgggggtgtcggcgtttgcccacaaggggggtatccatgtatcggcggtgcttaaagatgccagcacctatgaacatattagtccagacttggtgggcaatcagcagcgggtattggtcagtgagcaggcggggcgcagcaatctgatctataagttagaggagttgggtattgaaggggtggatgccaaagatccccgtctaactgaactgctgctggatgttaaagagctggagcaccaaggctaccaatttgatggggcagatgcctcgttccaactgcgggtgtggaaggcgctgggggagttgcccaactattttgagctgctgggctttcgggtcatagatgaacgccgggtgcgcaaggatggtcaacaccccatgggggcagaagcgacggtcaaaatgcgggtagcgggggaatcggtgcatctggtggccgaaggggctggcccggtggatgccctgcacaaggcgctaagtaaagcgctgcggcgggattaccccatggtgacagagctgaagttagaagattttaaggtgcgtattttgggcaatcgcaagggtaccgaggctaccgtgcgggtgcttattgagtggtatgatggccgttgccgctggggcactgtgggggtttcggaccatattatcgccgcctcttacgatgccatggttgaggcggttaagtacaagctgtttaaagataaagttaaacctgtttaa

SEQ ID NO: 6896 - protein, 534 aa, Magnetococcus sp. MC-1
MSAQAHPPVVLYDTTLRDGSQSEDVLFSAEDKLRIAKRLDALGLDYIEGGWPGANPKDDDFFRQAKQLKLQKSRITAFGSTRRAGSKVEEDQVIKGLLGSGAQVITVFGKSWDLHVSRALGIPLAQNLELIFDTIRYLKRHVDEVFYDAEHFFDGYRRNPEYARQTLQAAYEGGADALVLCDTNGGTMVEDLRRMIGEVTDLGAPLGIHCHNDCELAVANSLAAVEAGVTHIQGTINGIGERCGNANLISIIPNLKFKMQRSLTLDDEDLTQLTAVSRFVNEMANRPTQKNQPYVGVSAFAHKGGIHVSAVLKDASTYEHISPDLVGNQQRVLVSEQAGRSNLIYKLEELGIEGVDAKDPRLTELLLDVKELEHQGYQFDGADASFQLRVWKALGELPNYFELLGFRVIDERRVRKDGQHPMGAEATVKMRVAGESVHLVAEGAGPVDALHKALSKALRRDYPMVTELKLEDFKVRILGNRKGTEATVRVLIEWYDGRCRWGTVGVSDHIIAASYDAMVEAVKYKLFKDKVKPV

SEQ ID NO: 6897 - DNA, 1185 bp, Magnetococcus sp. MC-1
  CDS (1)..(1185): transl_table=11
atggatcaatcgaccgtcattttagacgacaccaccctgcgggatggtgaacaatcggcgggggtggcctttagcttggaagaaaagctaaagatcgccaccctgctggatcgtgctggtgtacccgagttggaggtgggtatacccgctatgggcgaagaggagcggcaggatatccgcgccatcgcgcaactgggtttgcgggcgcgactgttggtatggctgcgcatgcatgatgccgacatcagccacctaccgggtttgggggtggcgatggcggatctctccacctcggcttcggatcaacagatccggcataaactgggtcgcaatcggcgttgggtactcaacaccatccaacaccaagtcacccgggttagccaagagatggggattgaggtgtgtgtggggtgtgaagatgcctcgcgggcggagatcgactttttgctgcgcatgggcgaaaccgcacaaaaggcgggggcaaaacggctacgctttgccgacaccttgggtattttggacccctttaccacctatgagcggtttaaaacattgcgggctaatttggatctggagttagagatccatgcccacgatgatctggggctggcgacggccaacaccctagcggccattcgcggtggggccagccacgccaacaccacggtcaacggcctgggtgagcgggcgggcaatgcccccctcgaagaggtggcggtggcgttacagaccctacacggcggttataccggtattcagtgtgaccagctacaggtgctttcgcagtttgtggagagcgcatcgggccggccactctcgtgtcaaaagagtgtggtgggcagtgcggtatttcgccatgagtcaggcatccatgtggatggcctgcttaaagatcgccgcaactaccagggggtcgatcccgacattttgggtcggcaccatgagttggtgttgggcaagcattcgggacgccaaggggtgattgacgcctatggacgcatggggattgccataagccaggagctggctgggcaactcttgcagagcgtcaaaggctttgccacccgttataagcgctccccggagcaagcggaactgcaaagtttttaccgcttcttaaccgagcctgcccccctaacccccgccaaccacggaggattgctccatgcaacaccaagagtatga

SEQ ID NO: 6898 - protein, 394 aa, Magnetococcus sp. MC-1
MDQSTVILDDTTLRDGEQSAGVAFSLEEKLKIATLLDRAGVPELEVGIPAMGEEERQDIRAIAQLGLRARLLVWLRMHDADISHLPGLGVAMADLSTSASDQQIRHKLGRNRRWVLNTIQHQVTRVSQEMGIEVCVGCEDASRAEIDFLLRMGETAQKAGAKRLRFADTLGILDPFTTYERFKTLRANLDLELEIHAHDDLGLATANTLAAIRGGASHANTTVNGLGERAGNAPLEEVAVALQTLHGGYTGIQCDQLQVLSQFVESASGRPLSCQKSVVGSAVFRHESGIHVDGLLKDRRNYQGVDPDILGRHHELVLGKHSGRQGVIDAYGRMGIAISQELAGQLLQSVKGFATRYKRSPEQAELQSFYRFLTEPAPLTPANHGGLLHATPRV

SEQ ID NO: 6899 - DNA, 1569 bp, Shewanella sp. ANA-3
  CDS (1)..(1569): transl_table=11
atgtctaacagagtaattatatttgataccaccttacgtgatggcgagcaggcgttagcggcaagcctgtcggtcaaagaaaagttacagatcgccatggcgttagaacgtctcggtgtagatgtaatggaagtcgggtttcccgtgtcttcccccggtgactttgagtcggtgcagactattgcccgtaccatcaaaaatagccgtgtgtgcgccttatcccgcgccttggaaaaagatatcgatgccgccgcccaagcattatcggttgccgaacagttccgtattcatacctttatctccacctcgactatccatgtggagagcaagttaaagcgctcattcgagcaagtgttggagatggcggtgggcgcggtgaaatatgcccgcaggtttaccgatgatgtagagttttcctgcgaagatgcgggacgcacaccaatcgacaacctgtgccgtatggtagaagcggcgattcacgcaggggctcgtaccatcaatatccctgataccgtgggttacacagtgccaagcgagtttgggggtattattcaaaccttgtttaatcgcgtaccgaatatcgaccaagccattatctcggttcactgccatgatgacttaggcatgtcggtggccaattcgattaccgccgtgcagcatggtgcccgccaaatcgaatgtaccatgaacggcattggtgagcgtgcgggtaactgctccctagaagaaatcgccatgatcttagcgacgcgtaagaatctgttgggagttgaaactgggatcaatgccaaggagatccaccgtacgtcgaatctggtcagccagttgtgcaatatgccgattcagtcgaataaggcgattgtgggcgcgaatgcctttacccactcttcggggattcaccaagatggcatgttaaaagcgcaaaacacctatgaaatcatgacgccagagagcatcggcctaaaccgtaacaacctgaatatgacctcgcgctcaggtcgccatgtgattaagcatcgcatggaggaaatgggctacagcgagcaggatttcaatctggatgccctgtacgaacagtttttacatttggccgataaaaagggtcaagtcttcgattacgacttagaagccttagcctttatggaagcgcaagcggcggaagataacttctatcaattacagcagttagtggtgcaatccgactccaccgaaggcgtggccacggctactgtacgcatcgatgtcggcggagaaattaaaaccgaagctgcgaccggtaatggtcccgtcgatgccgcctataacgccattgcccgtgcgacggaccgtcgtatcgatatcatcagttacaaattgggcgctaagggtgaggggcaaaatgccctgggccaagtcgacattaccgcggtttaccatgaacaaaattttcacggtgttgggttagctaccgatgtggttgaggcatcagcccgtgcgttagtgcatgtgatgaacctgacgtgccgtgccgataaggtcgcagattacaaacagaatatgcataaaaacagagagctgggtggcgtataa

SEQ ID NO: 6900 - protein, 522 aa, Shewanella sp. ANA-3
MSNRVIIFDTTLRDGEQALAASLSVKEKLQIAMALERLGVDVMEVGFPVSSPGDFESVQTIARTIKNSRVCALSRALEKDIDAAAQALSVAEQFRIHTFISTSTIHVESKLKRSFEQVLEMAVGAVKYARRFTDDVEFSCEDAGRTPIDNLCRMVEAAIHAGARTINIPDTVGYTVPSEFGGIIQTLFNRVPNIDQAIISVHCHDDLGMSVANSITAVQHGARQIECTMNGIGERAGNCSLEEIAMILATRKNLLGVETGINAKEIHRTSNLVSQLCNMPIQSNKAIVGANAFTHSSGIHQDGMLKAQNTYEIMTPESIGLNRNNLNMTSRSGRHVIKHRMEEMGYSEQDFNLDALYEQFLHLADKKGQVFDYDLEALAFMEAQAAEDNFYQLQQLVVQSDSTEGVATATVRIDVGGEIKTEAATGNGPVDAAYNAIARATDRRIDIISYKLGAKGEGQNALGQVDITAVYHEQNFHGVGLATDVVEASARALVHVMNLTCRADKVADYKQNMHKNRELGGV

SEQ ID NO: 6901 - DNA, 1593 bp, Nocardioides sp. JS614
  CDS (1)..(1593): transl_table=11
atggacctgcacggcgccttccacgtctacgacaccaccctgcgcgacggcgcccagcaggaggggctcaacctctccgtcaccgacaagctgtcgatcgcgcggcagctcgacgggctgggcgtcggctacatcgagggcggctggccgggcgcgaacccgaaggacaccgagttcttccgccgcgccgccgccgagctcgacctccagcacgcgcggctcgcggcgttcggcgccacccggcgcgcgggcgtcaaagcggccgacgacccactggtcgcggcgctgcgcgacagcggcgcgagcgtggtcacggtggtggccaagtcctacgaccggcacgtcgagctcgcgctgcggaccacgctcgaggagaacctcgccatgatccgcgacaccgtcagccacctgcgcgccgaggggcagacggtcttcctcgacgccgagcacttcttcgacggctaccgggccaaccgcgactacgcgctcgaggtgctgcgcacggcgtacgacgcgggcgccgaggtgatcgcgctgtgcgacaccaacggcgggatgctgcccggctgggtgagcgatgtcgtccacgacgtgcgcgagaacgcccaggtgcgggtcggcatccactgccacaacgacaccggctgcgcggtcgccaacacgctggccgccgtcgacgccggcgcgacccatgtccagggcacgatcaacgggtacggcgagcgcaccgggaacgccgacctgctcgcggtggtcgccaacctcgagctcaagctggaccggcaggtgctgcccccgggcctgctcaccgaggccacccggatcgcgcacgcggtcgccgaggtcacgaacttcccgccggcatcgcggcagccgtacgtcggcagctccgcgttcacccacaaggccgggctgcacgccagcgcgatcaaggtggacccgaacctctaccagcacatggaccccgccggcgtcggcaacgacatgcggctgctggtctccgacatggccggccgggcctcgatcgagctcaagggacgcgagctcggtttcgacctctccggcgatcgcgacctcgtcgcccggatcaccgagcgggtcaaggtgctcgagagtcgtgggttcacgttcgaggcggccgacgcctccttcgagctgctgctgatcgaggaggtcgaggggcagcgcccgtcgtacttcgacgtcgagtcgtggcgggtgatcaccgagaccctcgccaagcgcagtgccggggaggaggcggtctccgaggccacggtgaagctcaaggccgggggcgtccggtacgtcgtcaccggggagggcaacggcccggtcaacgccctcgaccacgcgctgcgtgaggcgatcgtccaggcctacccgcaggtcgcgaagttcgagctgatcgactacaaggtccggatcctcgaccaggggcacggcaccgacgcgatcacccgggtgctgatcgagacgagtgacggcgagacctcctgggtcaccgtcggggtcggcgccaacgtcatcgaggcgtcgtggggggcgctggtcgacgggctcacgttcgggttgcgcaagcacgaggcctga

SEQ ID NO: 6902 - protein, 530 aa, Nocardioides sp. JS614
MDLHGAFHVYDTTLRDGAQQEGLNLSVTDKLSIARQLDGLGVGYIEGGWPGANPKDTEFFRRAAAELDLQHARLAAFGATRRAGVKAADDPLVAALRDSGASVVTVVAKSYDRHVELALRTTLEENLAMIRDTVSHLRAEGQTVFLDAEHFFDGYRANRDYALEVLRTAYDAGAEVIALCDTNGGMLPGWVSDVVHDVRENAQVRVGIHCHNDTGCAVANTLAAVDAGATHVQGTINGYGERTGNADLLAVVANLELKLDRQVLPPGLLTEATRIAHAVAEVTNFPPASRQPYVGSSAFTHKAGLHASAIKVDPNLYQHMDPAGVGNDMRLLVSDMAGRASIELKGRELGFDLSGDRDLVARITERVKVLESRGFTFEAADASFELLLIEEVEGQRPSYFDVESWRVITETLAKRSAGEEAVSEATVKLKAGGVRYVVTGEGNGPVNALDHALREAIVQAYPQVAKFELIDYKVRILDQGHGTDAITRVLIETSDGETSWVTVGVGANVIEASWGALVDGLTFGLRKHEA

SEQ ID NO: 6903 - DNA, 1191 bp, Azoarcus sp. BH72
  CDS (1)..(1191): transl_table=11
atgtctgcaccagtcaccatcgacgacaccaccctgcgcgacggcgagcaatcggccggcgtcgccttcacccgcgcggagaagtgcggcatcgcccgcatcctcgccgagatcggcgtgccggagctggagatcggcatcccggcgatgggcagcgaagagtgcggcgacatccgcgcgatcgccgacacgctcgccgacggcggccacgacacccgcctgatcgtctggggccgcctcaccagcgccgacatcgacgcctgtcgcagcctgccggtgcagatgctggaactgtcggtgccggtctccgaccagcaaatccgccacaagctcggcgccacccgtgacgaggtgctggcgcggatcgcgcgttgggtgccggtggcgcgtgaggcgggcttcgatgtcggcgtcggcggcgaagacgcctcgcgcgccgacccggccttcctcgcggaggtcatccaggccgccgaagccgccggcgcgcgccgtttccgcttcgccgacacgctgggcatcctcgaccccttcgccaccttcgaggcgatccgcgcgctgcgcgccgcttcaaagctggaaatcgaaatgcacgcgcatgacgacctcgggctggccaccgccaacaccctggccgcggtgcgcgccggcgccagccatgtgaacaccacggtgaacgggctcggcgaacgtgccggcaacgcggcgctggaagaagtcgcgcttggcctgcgccagttccatggcatgggcgagatcatcgacttcacccgcctgctcgacacctccgaagcagtcgcgcgcgcctccggccgcccggtgggctggcacaagagcgtggtcggcgaaggcgtattcacccacgaagccggcatccacgtggatggcctgctgaaggaccccgccaactaccagggcatcgaccccgcgctgctcggccgcagccaccgcatgctgctcggcaaacactcgggcggccgcggcgtcgccgccgcctacgccgggctgggcatcgaactcgacgccgcccgcaccgcctgcctgctggcccgcatccgcgagttcacctcgcgcaccaagcgcaccccgcagcgcgaagacctgctcgcgttctgggaagagctggaagccggcagcgcgcagtgcgacgacctgctgcacgacctgctcgacaccgccgcgggagcctga

SEQ ID NO: 6904 - protein, 396 aa, Azoarcus sp. BH72
MSAPVTIDDTTLRDGEQSAGVAFTRAEKCGIARILAEIGVPELEIGIPAMGSEECGDIRAIADTLADGGHDTRLIVWGRLTSADIDACRSLPVQMLELSVPVSDQQIRHKLGATRDEVLARIARWVPVAREAGFDVGVGGEDASRADPAFLAEVIQAAEAAGARRFRFADTLGILDPFATFEAIRALRAASKLEIEMHAHDDLGLATANTLAAVRAGASHVNTTVNGLGERAGNAALEEVALGLRQFHGMGEIIDFTRLLDTSEAVARASGRPVGWHKSVVGEGVFTHEAGIHVDGLLKDPANYQGIDPALLGRSHRMLLGKHSGGRGVAAAYAGLGIELDAARTACLLARIREFTSRTKRTPQREDLLAFWEELEAGSAQCDDLLHDLLDTAAGA

SEQ ID NO: 6905 - DNA, 1536 bp, Azoarcus sp. BH72
  CDS (1)..(1536): transl_table=11
atgaaagacgcattgatcatcttcgataccaccttgcgcgacggcgaacagagcccgggcgcctcgatgacccgcgacgagaagctgcgcatcgcgcgccagctcgaacgcatgcgggtcgacgtgatcgaggccggctttgcggcggcctccaacggcgacttcgagtcggtgcgctcgatcgccgaggcgatcaaggaatccaccgtctgttcgttggcgcgcgccaacgagaacgacatccgccgcgccggcgaggcgatccgccccgccgcccgcggccgcatccacaccttcatcgcgaccagcccgatccacatggagaagaagctgcggatgacgccggaccaggtggtggaacaggcggtgaaggcgatcggctgggcgcgcgaatacaccgatgacatcgagttctcggccgaggacgcgggccgctccgagatcgatttcctgtgccgcatcttcgacgcggtgatcaaggccggtgcaaagacgatcaacgtacccgacaccgtaggctacaacgtcccggagcagtacgccgcgaccctgcgcaccctgatcgagcgcgtaccgaacgcggacaaggtgatctggtcggtgcactgccacaacgacctcggcctcgcggtatcgaattccctcgccgccgtgatggcgggcgcgcgtcaggtggaatgcacgatcaacggcctgggcgaacgcgccggcaacgcgtcgctcgaagagatcgtcatggcggtgcgtacccgggccgacgtgttcccggtcagcaccaacatcgacaccacgcagatcgtcccggcatccaagctggtgtcgcagatcaccggctacccggtgcagccgaacaaggccatcgtcggcgccaacgccttcgcgcacgaatccggcatccaccaggatggcgtgctcaagcatcgtgaaacctacgagatcatgcgcgccgaagacgtgggctggggcgcgaacaagctcgtgctcggcaagcactcggggcgcaacgcgttccgcgcgcgcctgcaggaactgggtatcgagatcggctccgaagaacagctcaaccatgccttcgcccgcttcaaggaacttgccgacaagaagcacgagatcttcgacgaggatctccacgcgctgatgagcgatgaggcggtgacgcccgagcaggagcatttccgtctggtggccacccgcttccattcggaaaccggcgaaacgccgcgcgccgaagtcacgctcgcgatcggcggccaggaaacgcgcagccaggcggaaggctccggaccggtcgatgcggcgttcaaggcgatcgagtcggtggccggcagcggcagcgaactgctgctctattcggtcaacgcgatcaccaccggcaccgatgcgcagggcgaggtgaccgtgcgcctcgccaaggacggccgcgtcgtgaatggccagggcgccgacaccgacatcatcgtcgcctcggcgaaggcctacctcaacgcgctcaacaagctctgcggcggctcggaaaaactcaacccgcaagtctga

SEQ ID NO: 6906 - protein, 511 aa, Azoarcus sp. BH72
MKDALIIFDTTLRDGEQSPGASMTRDEKLRIARQLERMRVDVIEAGFAAASNGDFESVRSIAEAIKESTVCSLARANENDIRRAGEAIRPAARGRIHTFIATSPIHMEKKLRMTPDQVVEQAVKAIGWAREYTDDIEFSAEDAGRSEIDFLCRIFDAVIKAGAKTINVPDTVGYNVPEQYAATLRTLIERVPNADKVIWSVHCHNDLGLAVSNSLAAVMAGARQVECTINGLGERAGNASLEEIVMAVRTRADVFPVSTNIDTTQIVPASKLVSQITGYPVQPNKAIVGANAFAHESGIHQDGVLKHRETYEIMRAEDVGWGANKLVLGKHSGRNAFRARLQELGIEIGSEEQLNHAFARFKELADKKHEIFDEDLHALMSDEAVTPEQEHFRLVATRFHSETGETPRAEVTLAIGGQETRSQAEGSGPVDAAFKAIESVAGSGSELLLYSVNAITTGTDAQGEVTVRLAKDGRVVNGQGADTDIIVASAKAYLNALNKLCGGSEKLNPQV

SEQ ID NO: 6907 - DNA, 1539 bp, Acidovorax sp. JS42
  CDS (1)..(1539): transl_table=11
atgaccgacaagctcatcattttcgacaccaccttgcgcgacggcgagcagtcgccgggagcttccatgacgcgcgatgaaaagctgcgcattgcccgtcaattggagcggctgcgtgtggatgtgatcgaggcgggttttgccgccagttccaacggcgacttcgaatcggtgcaggccattgcgcgcgcagtgaaggattccacggtctgctcgctggcacgtgccaacgaccgggacatcgcacgtgctgccgaggcgctcaaagaggcaaaccgcgcgcgcatccatacgttcatcgccaccagcgcgctgcacatggaaaagaagctgcgcatgacgcccgagcaggtgctggagcaagccaggcaggcggtgcgttttgcacgcaacctggtggaggacatcgaattcagccccgaggatggctaccgcagcgatccggacttcctgtgccgcgtgatcgagacggtgatcgcggagggcgccaccaccatcaacgtgcccgacaccgtgggttacgccattcccgagctgtacggcaacttcatcaagaaccttcgcgagcgcattcccaacagtgacaaggccatctggtccgtgcactgccacaacgatctgggcatggcggtcgccaactcgctggcgggtgtgaagatcggcggggcacgccaggtggagtgcaccatcaacggcctgggcgagcgtgcgggcaattgttcgctggaggaggtggtgatggccgtgaagacgcggcgcgactacttcggcctggacgtcggcattgatacccagcacatcgtggccgccagccgcatggtcagccagaccaccggctttgtggtgcagcccaacaaggccgtggtgggcgccaatgcgttcgcccacgcctcgggcatccaccaggacggcgtgctcaaggcgcgcgacacgtacgagatcatgcgcgccgaggacgtgggctggagcgcgaacaagatcgtgctgggcaaactcagcggccgcaatgcgttcaagcaacgtctgcaggaactgggcgtccagttggagagcgaaggcgaaatcaacgtggcgtttgccaaattcaaggaactcgccgaccgcaagagcgagatctttgacgaggacatcctggcactcgtgagcgacgaaagcgtgaccagcgagaaggagcagttcggcttcgtgtccctggcgcagcacagcgagacgggcgaacggcccgaggcgaccatcgtgttcaccgtggacggcaaggaagtccgcagctcctcggagggcaacggcccggtcgatgcctcgatgaaggccatcgaggcgcatgtgcgcagcggtgccgagatggtgctgtactcggtgaacgccatcagtggctccaccgaaagccagggcgaagtcaccgtgcggttgcagagcgccggccgggtggtgaatggcgtaggggccgaccccgacatcgtggtggcatcggccaaggcctacctcagtgccctgaataaattacaaagtaaagctgagcgcgtggcagcgcagggctga

SEQ ID NO: 6908 - protein, 512 aa, Acidovorax sp. JS42
MTDKLIIFDTTLRDGEQSPGASMTRDEKLRIARQLERLRVDVIEAGFAASSNGDFESVQAIARAVKDSTVCSLARANDRDIARAAEALKEANRARIHTFIATSALHMEKKLRMTPEQVLEQARQAVRFARNLVEDIEFSPEDGYRSDPDFLCRVIETVIAEGATTINVPDTVGYAIPELYGNFIKNLRERIPNSDKAIWSVHCHNDLGMAVANSLAGVKIGGARQVECTINGLGERAGNCSLEEVVMAVKTRRDYFGLDVGIDTQHIVAASRMVSQTTGFVVQPNKAVVGANAFAHASGIHQDGVLKARDTYEIMRAEDVGWSANKIVLGKLSGRNAFKQRLQELGVQLESEGEINVAFAKFKELADRKSEIFDEDILALVSDESVTSEKEQFGFVSLAQHSETGERPEATIVFTVDGKEVRSSSEGNGPVDASMKAIEAHVRSGAEMVLYSVNAISGSTESQGEVTVRLQSAGRVVNGVGADPDIVVASAKAYLSALNKLQSKAERVAAQG

SEQ ID NO: 6909 - DNA, 1551 bp, Magnetospirillum magnetotacticum MS-1
  CDS (1)..(1551): transl_table=11
atggacaagaaccgcgtcatcatcttcgacaccacgctgcgcgacggcgagcaatcgcccggcgcctccatgaatctggaggagaaggtccgcattgcgctggcactggaagagatgggcgtcgatgtgatcgaggcgggctttcccattgcgtccaacggcgatttcgaggccgtggaggccgtggccagggcggtgaagacttcggtgatctgtggcctggcccgcgccaccaagggcgatatcgagcgctgcgccgaagccgtcaaaccggcggggcggggccgcatccataccttcttgtccaccagcccgctgcacatgaaatacaagctgcagatggagccggaaaaggtcctggagaagatctccgaatcggtggcctatgcccgcaacctgaccgacgacgtggaatggtcggccgaggacggctcgcgcaccgaacacgacttcctgtgcacctgtgtcgaggccgccatcaaggccggggcgcgcaccatcaatatccccgacacggtgggctatgccatcccggatgaatatgcggccctgatcgctatgctgttcaaccgcgtgcccaatatcgacaaggcgatcatctcggtccattgccacaacgatctcggcctcgccgtggccaattccctggccgccgtgggcaagggcgcgcggcagatcgaatgcaccatcaacggcttgggcgaacgcgctggcaatgccgccatggaagagatcgtcatggcgctgcgcacgcgccccgacctcctgccctacaagtcgggcgttaagaccgagaacatcacgcgggcgtcgcggctggtgtccaccatcaccggcttcgtggtgcagcccaacaaggccatcgtcggcaagaacgccttcgcccatgaatcgggcatccaccaggacggcgtccttaagcacgcccagacctacgagatcatgaccccggaatccgtgggtctgaaccgttcgtccctggtgatgggcaagcattcgggccgcgccgccttcaaggccaagctgaaggatctgggttacgaactgggcgacaacgccgtcgaggacgcctttacccgcttcaaggacctggccgaccgcaagaaggacgtgttcgacgaggatatcgtcgccctggtcgatgacgccgtggtgcgcggcaacgaccggctcaagctggtctcgctggaagtgctgtgcggcaccaagcaccagccgccctcggccgaactggagctttcggtggacggcgtggtgaaaagcgtgcgcgctacgggtgacggcccggtggacgccaccttcaacgccatcaaggcgctgttcccccatgaggtcaagctgcagctctatcaggtgagcgcggtaacccagggcaccgacgcccaggccgaggtgaccgtgcgcctggaagaggacggcaaaagcgtcaacggccaggggcgccgaaaccgatactttggtggcctcggcgcgggcctatgtcaacgcgttgaacaaacttctggtcaaacggcaaaaaaccgcccccgatgccgccggagcgtgatatag

SEQ ID NO: 6910 - protein, 516 aa, Magnetospirillum magnetotacticum MS-1
MDKNRVIIFDTTLRDGEQSPGASMNLEEKVRIALALEEMGVDVIEAGFPIASNGDFEAVEAVARAVKTSVICGLARATKGDIERCAEAVKPAGRGRIHTFLSTSPLHMKYKLQMEPEKVLEKISESVAYARNLTDDVEWSAEDGSRTEHDFLCTCVEAAIKAGARTINIPDTVGYAIPDEYAALIAMLFNRVPNIDKAIISVHCHNDLGLAVANSLAAVGKGARQIECTINGLGERAGNAAMEEIVMALRTRPDLLPYKSGVKTENITRASRLVSTITGFVVQPNKAIVGKNAFAHESGIHQDGVLKHAQTYEIMTPESVGLNRSSLVMGKHSGRAAFKAKLKDLGYELGDNAVEDAFTRFKDLADRKKDVFDEDIVALVDDAVVRGNDRLKLVSLEVLCGTKHQPPSAELELSVDGVVKSVRATGDGPVDATFNAIKALFPHEVKLQLYQVSAVTQGTDAQAEVTVRLEEDGKSVNGQGRRNRYFGGLGAGLCQRVEQTSGQTAKNRPRCRRSVI

SEQ ID NO: 6911 - DNA, 1623 bp, Nostoc punctiforme PCC 73102
  CDS (1)..(1623): transl_table=11
atgagcatcacatctcaaccagaccgagttatcatcttcgacaccacgctacgggatggcgaacagtcaccgggcgcaaccctcaatgtagaagaaaagctggcgatcgctcatcaactagctctccttggtgtcgatgtgattgaagcaggttttgccgttgctagtccgggagattttcaagctgttaaaaccattgctgaacaagttggaatacctggtggaccaatcatttgcagtttagctagagccattcgccaggatattcacgccgccgccgaagccttgaagggagcggctcgtcccagaatccacacgatgatttctacctctgatattcacctgaaatatcagttgaaaaagtctcgcagcgaagtattagcgatcgcatcagaaatggttgcttatgctaagtcgtttgtagacgatgtagaattttcaccaatggatgccagccgcactgaaccagagttcctgtatgaagttttggaggcggcgatcgcagcaggtgcaactacaatcaacattcctgataccgttggttactgcacacccaaggaaatcggaactctaattcaaggaattcgagaacatgttcctaatatcgatggggtgattctttcgattcacactcaaaatgatttgggtttggcgacagctaacgctttggcagcaattgaatatggtgtgcgtcaggtggaatgtacgattaatggtattggagaacgggctggaaatgcagcattagaagagattgtgatggcgttgcaagttcgcaaaccatttttcaatccttactttggtcgtccggttgatgctgatacacctctgactaatattaagactcaggagatttataaaacctcatccttggtttcccaattaactgggatgctgattcagcccaataaggcgatcgtgggagcaaacgctttcgcccatgagtctggtattcaccaagatgggattatcaagcatcgccagacttatgaaattatggaagctgctgcgatcggtttgccagaaaatcgtattgttttgggcaagcactctggacgaaatgcttttcgtaccaggctcaaggaattggggtttgaattgaacgaggcggacttgaataaagccttcaatcgattcaaagatgtcgccgataagaaaaaagaaatctcagattgggatttagaagcgatcgttcgagatgaaacgcagattcaagtagaaagtggcttccaaatcgaacacgttcaggtaatttgtggtgactgcacttgcccaactgcaaccattacaattgttacccccgatggtaaaatcctcacagatgcgagtgtaggcactggcccagtggatgcggtgtatcaagcaatcaatcgattggtgcagattcccaatcaactaattgaattttccgtccaatctgtgactggagggattgatgcactaggaacagttacagttcgcttgaaacatcaagagcggatattctctggacaagcatctgatactgatatcgtggtagcagcagcttacgcccatatcaacgccttgaatcgtctttatcgttacttgcaaactgagaaatccgagtttcatgagataaactctgctgttgtctctgggtag

SEQ ID NO: 6912 - protein, 540 aa, Nostoc punctiforme PCC 73102
MSITSQPDRVIIFDTTLRDGEQSPGATLNVEEKLAIAHQLALLGVDVIEAGFAVASPGDFQAVKTIAEQVGIPGGPIICSLARAIRQDIHAAAEALKGAARPRIHTMISTSDIHLKYQLKKSRSEVLAIASEMVAYAKSFVDDVEFSPMDASRTEPEFLYEVLEAAIAAGATTINIPDTVGYCTPKEIGTLIQGIREHVPNIDGVILSIHTQNDLGLATANALAAIEYGVRQVECTINGIGERAGNAALEEIVMALQVRKPFFNPYFGRPVDADTPLTNIKTQEIYKTSSLVSQLTGMLIQPNKAIVGANAFAHESGIHQDGIIKHRQTYEIMEAAAIGLPENRIVLGKHSGRNAFRTRLKELGFELNEADLNKAFNRFKDVADKKKEISDWDLEAIVRDETQIQVESGFQIEHVQVICGDCTCPTATITIVTPDGKILTDASVGTGPVDAVYQAINRLVQIPNQLIEFSVQSVTGGIDALGTVTVRLKHQERIFSGQASDTDIVVAAAYAHINALNRLYRYLQTEKSEFHEINSAVVSG

SEQ ID NO: 6913 - DNA, 1134 bp, Nostoc punctiforme PCC 73102
  CDS (1)..(1134): transl_table=11
atgaatcaaatcataattaatgacactacactacgtgatggcgaacaggcagcaggtgttgcttttaccctacaagaaaaagtagcgatcgctaagtttctcgattctattggtattcccgaattagaagtcggtataccagcaatgggtgacgaagaaacccgtgcgatcgccgcaatttctgacttgggtttacaagcaaaactcctgggctggaaccgcgctgtcatctcagatattaaggcttctatcgcttgcggtctgaaccgggtgcatattgccattcccgtctctggtatccaaatcgccgccaaattccacggtcaatggcgagtaagtttgcaaaaactcaaagactgtattagcttcgccgtcgatcaaggtctttgggtagcagtcggcggagaagattcttccagggctgacgaaaacttccttttagatgtagcgctttatgctcaagaatggggtgcatcccggttccgcttctgcgacaccgtaggagttctcgaccctttcaccacctacaccaaggttaaacggctggtttcagctttgatgattcctctagaaatccacacccacaacgattttggtctggcaacagccaacgcccttgcgggtatcaaagctggagccttatcagtgaataccacagttaacggattaggcgaaagagcgggaaacgcagctttagaagaagttgtcatggcaatcaaacgcatctatggcgttgatttgggcattgacacacccggtttgctggaactatctcaactagttgcagccgcatcaggagctagcgtaccaccttggaaagcgatcgttggcgaaaatacctttgctcacgaatctggcatccatgctcacggggtattgcaaaatcccattacctacgaaccatttgctcccgaagaggtgggttgggaacggcgtctagtattaggtaaacattctggacggcatttggtttcaaacttgctagaacaacatggaattttcttgaactcccaagaaacccaatctgttttagatgcagtgcgccatcaatcggtacagaaaaaacgcagcctgacgacagaagaactattgaatttggtcagagaacagaggtactctcatgcaacgcgatga

SEQ ID NO: 6914 - protein, 377 aa, Nostoc punctiforme PCC 73102
MNQIIINDTTLRDGEQAAGVAFTLQEKVAIAKFLDSIGIPELEVGIPAMGDEETRAIAAISDLGLQAKLLGWNRAVISDIKASIACGLNRVHIAIPVSGIQIAAKFHGQWRVSLQKLKDCISFAVDQGLWVAVGGEDSSRADENFLLDVALYAQEWGASRFRFCDTVGVLDPFTTYTKVKRLVSALMIPLEIHTHNDFGLATANALAGIKAGALSVNTTVNGLGERAGNAALEEVVMAIKRIYGVDLGIDTPGLLELSQLVAAASGASVPPWKAIVGENTFAHESGIHAHGVLQNPITYEPFAPEEVGWERRLVLGKHSGRHLVSNLLEQHGIFLNSQETQSVLDAVRHQSVQKKRSLTTEELLNLVREQRYSHATR

SEQ ID NO: 6915 - DNA, 1134 bp, Crocosphaera watsonii WH 8501
  CDS (1)..(1134): transl_table=11
ttgacaaatattcatatcaatgatacaaccctacgggacggggagcaagctgctggtattgttttcagtgccgccgaaaaaatagcgatcgcttcgatgatggatagtatgggtattcctgaattggaagtgggtatccctgctatgggaggctcagaagcccaagccatcaccaccattgtccaaaaaggtttaaaggccaagcttttaggctggaaccgtgccgtccgttccgatatagaagcctccattgcctgtggcttaaaaagggttcatatctctgtccctgtttctgaaattcaaattaaggcaaaatttaaaggaaaaactaatcttgtttggcaacgcttaaaagatagtctgaattttgctttagatcaggatttatttgtttctgtgggggctgaagacgcttcgagggcggatgaatcctttttactcgaagtagctcagtttgctcagtctttaggtgcttcacgtttccgtttttgcgatacggtgggcattcttgagcctttaaccacggcgcaaaaagtgggaaaattggttgagtgcctgaagattcccattgaaatgcacacccacaatgactttggtttagctactgctaacgccttagccgggttgcaagcaggggcaacggcggttaataccaccgttaacggcttgggagaaagagctggtaatgcggccttagaagagatgattatggctctcaaacgactctatcaggttgatttagccatagaaacctctcgcctacgggaattatctcaacaggtgatagctgcctctggtattgcccttcccccttggaaggcgatcgtcggggacaatgtttttgcccacgagtcgggtattcacgcccacggtgtcttagaaaacccccaaacctacgaacccttttcccccgatgaggtgggttggaaacgccgtttagtggtgggcaaacattcgggacgacatttattgaccaatgtattgagtcaacatggtattcgtttaaaccatgaagagtcccaagtggtgttagactccgtgcgccatttatcggtgcaaatgaaacgcagtctaaccgttgaagagttactttatgttgtatctaataggagtatgtctcatgggattgtatag

SEQ ID NO: 6916 - protein, 377 aa, Crocosphaera watsonii WH 8501
MTNIHINDTTLRDGEQAAGIVFSAAEKIAIASMMDSMGIPELEVGIPAMGGSEAQAITTIVQKGLKAKLLGWNRAVRSDIEASIACGLKRVHISVPVSEIQIKAKFKGKTNLVWQRLKDSLNFALDQDLFVSVGAEDASRADESFLLEVAQFAQSLGASRFRFCDTVGILEPLTTAQKVGKLVECLKIPIEMHTHNDFGLATANALAGLQAGATAVNTTVNGLGERAGNAALEEMIMALKRLYQVDLAIETSRLRELSQQVIAASGIALPPWKAIVGDNVFAHESGIHAHGVLENPQTYEPFSPDEVGWKRRLVVGKHSGRHLLTNVLSQHGIRLNHEESQVVLDSVRHLSVQMKRSLTVEELLYVVSNRSMSHGIV

SEQ ID NO: 6917 - DNA, 1614 bp, Crocosphaera watsonii WH 8501
  CDS (1)..(1614): transl_table=11
atgagcaatcaaaccgatcgcattatcatatttgataccaccctcagagacggggaacagtccccaggtgcaagtttaacggttgaagaaaaacttaccattgctcgcgctttagcacgacttggggtagatataatagaggccggtttcccctacgctagtccaggtgattttcaggcagtacagaaaattgctgaaactgtaggcacggaaaacggtccgagaatctgtggtttggcaagagcatctacaaaagatatcaaggcagcaggagaagcactaaaaccggcatttaagtcccgtattcatacctttatcgctacttctgacatccatctcaagcataaactgaaaaaaacacggtctgaagtgttagacattgtgccggaaatggtagcttatgctaaaaccttcaccgatgatatagaattttctccagaagatgcaggccgtagtgatcctgagtttatgtatcaggtattggaaactgcgatcgcagcaggtgcaactactgttaatattcccgacaccgtaggttataccacccccagcgagttcggtgcaatcatcaaaggtattaaagataatgtccccaacatagaccaagctatcatctcagtgcatggtcatgatgatctgggtttagctgtggccaacttcctggaagcggtgaaaaatggagccagacagctagaatgtaccattaatggtattggggaacgtgcgggcaatgcggctttagaagagttggttatggctctccacgtgcgtcgtcaatattttaaccccttcttgggtcgtgcagtagattccacggaacctttaactaatattaacacccaagaaatttacaaaacctcccgtctggtatccaacctcacaggaatgattgtacaacctaataaagctattgtgggagcaaatgcttttgctcacgagtctggtatccatcaagacggggttcttaaaaataagttaacctacgaaattatggatgcagagtccatcggtttgaccaataatcagattgtactgggtaaactttctggacggaatgcttttcgcacccgtttaagtgagttagggtttgagttatccgacaatgacttgaataacgctttcttgcggtttaaagaggttgctgacaagaaaaaagagatcaccgactgggatctcgaagccattgttaatgatgagattcaacaggcaccagaattgttccgtctcgaattagtacaagtatcctgtggcgatcacgctgtctctactgctacagttactctgaggaatccagaagggaaagaattaaccgatgctgcgatcggtactggtccggtggatgctgtttataaagccatcaaccgtgtagtgaatgttcccaacgagttgatcgagttttccgttaagtcggttactgctggtatcgatgcaatgggagaagttaccatcagattacgtcatgagggacgcacctactccggttatgcagccaataccgacattataactgcttctgcccgtgcttatattagcgcgttaaatcgtctttatggagcgatccaagaacaatctaaagttaactcttctgaagctgttttaacccctcaaggttaa

SEQ ID NO: 6918 - protein, 537 aa, Crocosphaera watsonii WH 8501
MSNQTDRIIIFDTTLRDGEQSPGASLTVEEKLTIARALARLGVDIIEAGFPYASPGDFQAVQKIAETVGTENGPRICGLARASTKDIKAAGEALKPAFKSRIHTFIATSDIHLKHKLKKTRSEVLDIVPEMVAYAKTFTDDIEFSPEDAGRSDPEFMYQVLETAIAAGATTVNIPDTVGYTTPSEFGAIIKGIKDNVPNIDQAIISVHGHDDLGLAVANFLEAVKNGARQLECTINGIGERAGNAALEELVMALHVRRQYFNPFLGRAVDSTEPLTNINTQEIYKTSRLVSNLTGMIVQPNKAIVGANAFAHESGIHQDGVLKNKLTYEIMDAESIGLTNNQIVLGKLSGRNAFRTRLSELGFELSDNDLNNAFLRFKEVADKKKEITDWDLEAIVNDEIQQAPELFRLELVQVSCGDHAVSTATVTLRNPEGKELTDAAIGTGPVDAVYKAINRVVNVPNELIEFSVKSVTAGIDAMGEVTIRLRHEGRTYSGYAANTDIITASARAYISALNRLYGAIQEQSKVNSSEAVLTPQG

SEQ ID NO: 6919 - DNA, 1173 bp, Prosthecochloris aestuarii DSM 271
  CDS (1)..(1173): transl_table=11
atgatacataaacgagagaaggctgatatcgcgaaacgacccgtatggataatcgatacgacattacgtgatggtgaacaggctcccggagtagcattcacccccgaagaaaagaaaacaatcgccggaaaactggctgaatgcggggtcaatgaacttgaaataggctatccggcaatcagcagtgaagaacaggccgttattacagaaattgcacggatgcagcttccgctccgcctcacctcctgggctcgggcaaaatgggaagatatcgatgcagcgatcagatgcaaaacacaaggcgtccacatcagcttccccctgtcagaactctacctgcaactgatggataaaccatatgagtgggttgaggaacaactgcatctgctcgtacccaaagcaaaaaaatactttgactttgtcagtgttggcggccaggatgcaacaagaacagggccggatattctggagcgcttcattcgtgaagccgtcgaatgcggagctgacagaataagaattgccgataccgttggtatcgcaacgccgctgcatctcatgcagctgatatcacgaataaaaaaagctgttcccgctacacttgaatttcatgcccacaatgatctcggcatggctacagccaatgcgttcagcgccatggaagccggctgcgacgctgtcagcgtttctgttaccgggctcggtgaacgggccggcaatgccgcactggaagaacttgcgatcgcactgaaactctccggtcgttaccattcatctatcaaaacagaacgcctgcaggaactctgcggcatcgtcgccaaagcctcgaacaggaacatcgaggaccagaaaccggtaatcggcgcatcagtcttccgccatgaatcaggcattcactgtaacgccctcctgaaaaaccctctttcctaccagcccttcctcccgggagaaatcgggcgcgacaactatgaactggttatcggcaaacattcgggaagcgccgcgatccagcatgttcttgcaggaaacgggatcgcgatcgaccgcaaagaggcatccagactgcttgctccggttcgcatgactgcagacagaaacaaacgcggcatttcagccgatgaactgaccagaatctatcaacaatacattgtcaaccctcaagacatatgcagataa

SEQ ID NO: 6920 - protein, 390 aa, Prosthecochloris aestuarii DSM 271
MIHKREKADIAKRPVWIIDTTLRDGEQAPGVAFTPEEKKTIAGKLAECGVNELEIGYPAISSEEQAVITEIARMQLPLRLTSWARAKWEDIDAAIRCKTQGVHISFPLSELYLQLMDKPYEWVEEQLHLLVPKAKKYFDFVSVGGQDATRTGPDILERFIREAVECGADRIRIADTVGIATPLHLMQLISRIKKAVPATLEFHAHNDLGMATANAFSAMEAGCDAVSVSVTGLGERAGNAALEELAIALKLSGRYHSSIKTERLQELCGIVAKASNRNIEDQKPVIGASVFRHESGIHCNALLKNPLSYQPFLPGEIGRDNYELVIGKHSGSAAIQHVLAGNGIAIDRKEASRLLAPVRMTADRNKRGISADELTRIYQQYIVNPQDICR

SEQ ID NO: 6921 - DNA, 1692 bp, Prosthecochloris aestuarii DSM 271
  CDS (1)..(1692): transl_table=11
atgttcttgaaatcgtcaaggcaggcggcatttttgcctatgccaggcaggaaaaccttatggcttgaactcgatatgaaggaaagaaacgcaatcgaactctacgatacaacgctccgggacggaacccagggtgaaaaaatcaacctctccgtacaagataagctgcttattgctgaaaaactcgatgagttcggtgctgactatatagaaggaggatggcccagcagcaatcccaaggatgaagagtttttccgaaaagcgctcggcctgcgtctcagcaatgccaaaatctgcgcatttggctcaacagccagaaaaccggacaatatcgcaaacgatccgaatcttgcaggcctcctcgcttctgaaacaccggtcattaccatctttggtaaaacctggaaggcacactccgctgtaagccttggcctctgcgatgaagaaaatgccgagctcatttaccgctctgtcgagcatctcaagaaagaaggacgtgaagtgctcttcgacgcagagcattttttcgatggttataaagacaatcccgccttcgccatcaaaatgcttctctcagccgaggaagccggagcggaccgactggtcctgtgcgatacgaatggaggaaccctcccgaatgaaatctatgaaatagtaaaagatgtagcatcatcgaccactgtcccgctgggaattcattcacataatgacggagaccttgctgtagccaatgccctttcagctctcagagcaggcgcgatgcacgttcagggcacgatcaacggaattggcgaacggtgcggcaatgccaatcttatcagcatcatccccaatgtcgttctgaaaatgaatgggaggttccgccacaaactgcagctcaaccagctgacaccgctctcaaagttcgtttacgaaattctgaacatgcctcctgataaccgggccccgttcgtcggacgatcagcatttgcccacaaaggaggaattcatgtcagtgccgttatgaaagagagctcactctacgagcacattgatccgaaaagtgtcggaaaccgtcagagagttcttgtttcagagctctcaggtcagagcaatattcgatacaaggcaaatgagcttggaattaacctcccggctgataatgcagccctctttaaaacgcttgttcagcgcattaaaacactcgaacacgaagggtttcagtttgatgtcgccgaagcatcgtttgaactgcttctgcgtcaccaactcggccagttcaagccgtttttcactgttctggaatccaagctccacatcgagtccggaaaaaaccgcgaatcagtcgatcaggctgtcctgaaaatcgaggtttgtgatgagattgagttgacagcagcagacggtgacgggccggtcaacgctctggacaaagcattacgaaaatcgcttcgtggattttatcctgaaatccgcagcatgcgccttgtcgattataaggttcgcgtacttgaagaaaaaaaaggtaccagcgccaaagtgagagtccttattgaatccagcgatggtcagaacagctggtcgacggtaggcgtttcacccaatatcatcgatgcaagccttcaggcgctcagcgacagcattaactactatctgttcacatacagaacagaaaaagcaaaccgcctcagcactgcccaatccgcctcataa

SEQ ID NO: 6922 - protein, 563 aa, Prosthecochloris aestuarii DSM 271
MFLKSSRQAAFLPMPGRKTLWLELDMKERNAIELYDTTLRDGTQGEKINLSVQDKLLIAEKLDEFGADYIEGGWPSSNPKDEEFFRKALGLRLSNAKICAFGSTARKPDNIANDPNLAGLLASETPVITIFGKTWKAHSAVSLGLCDEENAELIYRSVEHLKKEGREVLFDAEHFFDGYKDNPAFAIKMLLSAEEAGADRLVLCDTNGGTLPNEIYEIVKDVASSTTVPLGIHSHNDGDLAVANALSALRAGAMHVQGTINGIGERCGNANLISIIPNVVLKMNGRFRHKLQLNQLTPLSKFVYEILNMPPDNRAPFVGRSAFAHKGGIHVSAVMKESSLYEHIDPKSVGNRQRVLVSELSGQSNIRYKANELGINLPADNAALFKTLVQRIKTLEHEGFQFDVAEASFELLLRHQLGQFKPFFTVLESKLHIESGKNRESVDQAVLKIEVCDEIELTAADGDGPVNALDKALRKSLRGFYPEIRSMRLVDYKVRVLEEKKGTSAKVRVLIESSDGQNSWSTVGVSPNIIDASLQALSDSINYYLFTYRTEKANRLSTAQSAS

SEQ ID NO: 6923 - DNA, 1560 bp, Xylella fastidiosa Ann-1
  CDS (1)..(1560): transl_table=11
gtgaacacgagcatatccagccagccgccctgtatccggatttttgataccaccctgcgggacggtgagcaatctcccggttgcagtatgcctgcacaacaaaaactggtcatggcacgcgcattagatgcattgggcgtagacattatcgagactggtttcccagccagttcccaatccgactacgaagccatgacgctgatcgcacgcgagttacgtagaccaactctggcagtactgtcacgttgtctgcaagccgatatcgaaacttcagcacgcgcactggaatcagcaaccaaaccacgcttgcatgtatttctgtcaaccagcccattacaccgcgagcacaagctacgcatgagcaaggaacaggtgctggagtcagtgcacaagcatgtgagtctcagtcgaaccttaattgacgatgtggaattctcggccgaggatgcgacgcgcactgaggaggatttcctgatagaggttacccgcgtggcaatcgccgctggtgcaaccacgatcaacctgccagacaccgtagggttcagcacgcctgaagaaatccgcaacatgtttacgcgcgtcatcgcgaacgtcgaaggtgcaaacaaagtgatctttagtgcgcactgccacgacgatctgggtttggccgttgctaactcgctggcagccattgagggtggtgcacgccaaatcgaatgtactatcaatggcattggtgagcgcgctggtaactgcgcgctggaagaactcactatggtgttgaaagtacgcaacgcgttttacaacattgatacttcgatccacacatcacgtatcgtctccacctcccagttactgcaacgattggttggcatgcccgtgcaacgtaacaaggcagtagtaggtgccaatgcctttgcacatgaatcgggtatccatcagcacggtatgctgcgccatcgcggcacctacgaaatcatgcgtccacaagaagtcggttgggtatgttcgcacatggtactcggccgccatagcggccgtgctgcggtcgaacagcgtctacgcgcactgggctacttgctggaggaagaagatctaaaactggtatttgaagaattcaaacagctttgtgagaaacagcgtttggtcaccgatgtcgacctgcaagtactgatgcaagatacaacagtacagcatggctatcgcttggcctcaatgacaatcagtgatgttggtaaccgggccaatgcactggtggaattgtccgatccccaaggtcagcgtgttgccgaaactgcgcaaggcaacggcccagtagatgcactgttcggagcgctggctgcagcaactggggtcaaactggagttggacagctatcaggtacacagtgttggtatcggggccgatgcacgtggtgaagcaaacctcagtgtacgccacaacgatactcagtacgaaggtacagggaccagtaaagacattatcgaagccagtgcgctcgcttggctagacgtcgccaaccgtttgctacgtaatcccgaaaatatgcaaaataaacaaaacacagcactggcctga

SEQ ID NO: 6924 - protein, 519 aa, Xylella fastidiosa Ann-1
MNTSISSQPPCIRIFDTTLRDGEQSPGCSMPAQQKLVMARALDALGVDIIETGFPASSQSDYEAMTLIARELRRPTLAVLSRCLQADIETSARALESATKPRLHVFLSTSPLHREHKLRMSKEQVLESVHKHVSLSRTLIDDVEFSAEDATRTEEDFLIEVTRVAIAAGATTINLPDTVGFSTPEEIRNMFTRVIANVEGANKVIFSAHCHDDLGLAVANSLAAIEGGARQIECTINGIGERAGNCALEELTMVLKVRNAFYNIDTSIHTSRIVSTSQLLQRLVGMPVQRNKAVVGANAFAHESGIHQHGMLRHRGTYEIMRPQEVGWVCSHMVLGRHSGRAAVEQRLRALGYLLEEEDLKLVFEEFKQLCEKQRLVTDVDLQVLMQDTTVQHGYRLASMTISDVGNRANALVELSDPQGQRVAETAQGNGPVDALFGALAAATGVKLELDSYQVHSVGIGADARGEANLSVRHNDTQYEGTGTSKDIIEASALAWLDVANRLLRNPENMQNKQNTALA

SEQ ID NO: 6925 - DNA, 1563 bp, Streptococcus suis 89/1591
  CDS (1)..(1563): transl_table=11
atgcgtgtgattgaatttttagatacgactttacgagatggtgaacagacgccgggtgtgaatttttcgattaaagaaaaagtgaccatcgccaagcagttggaaaaatgggggatttctgctattgaagcgggtttcccagcggccagtcctgattcgtttgaagcggttcgtcagattgcggcagcgatgaccaagacggctgtgacaggtttggcacggtcagtaaaatcagacattgatgcttgttatgaggctctgaaagatgccaagtatccgcagatccatgttttcattgcgaccagccccattcatcgtgaatttaaacttcaaaagaccaaagaagaaattttggcgcaaatcactgaacatgtcagctatgcacgtgagcgttttgaggtggtggaattctcgccagaggatgcgacacggacggagttggattacttgcttgaagtggtgcagacagcggtagatgctggtgcgacctacatcaacattccagatacagtcggctttacgactcctcagcactacggagaaattttccgtcacttgataacaaacgtcaaatcggaccgtgagattattttcagtccgcattgccacaatgacctaggtatggcagttgccaataccctatcggccattaaaaacggtgccggtcgtgtcgagggcaccattaacggtatcggtgagcgagcagggaatgcggcccttgaagaagtagctgttgcccttgaaattcggaaagatttctatgatgtgactagtccgattgttcttaaggaaatgctcaatacttcggaattagtatctcgcttttctgggattgccattccacgcaataaggcggtggttggtggcaatgccttctcacatgaatctggtatccatcaggatggtgtcttgaaaaatccattgacctatgaaatcattacacctgagttggtaggggtcaagaaaaattctctgccactgggtaaactatctggtcgtcacgcctttgtagaaaagctaaaagaactagacttgtattttgaagaaggagacgttgctagcttgtttgctcgtttcaaaaacctggcagacaagaaggaaaaaatcacggatgcagatattcgtgccttggtagctgggacagaaattagcaaccgtgatggtttccaatttaaagatttgcgtttggatagtcagtctgacggaagtattcaggctcaggtcatcttcatcaatcaggatgaggaagaagtggttgttgcagagtcaggcaagggttctgttgaggctgtctttaatgctgttgaccaattcttccaccaagagattagcttggaacgctaccatattgacgccatcaccgatggaattgatgcccaggcgcgtgtgcttgtcgctgtagaaaacaaggcaacggaaacaatcttcaatgcctctggtattgactttgacgtggtgaaggcttctgccattgcctatatccatgccaatgtcatggtacagaaagaaaatagcggacagattgataagaaattatctgagaaagagttgccaactagctag

SEQ ID NO: 6926 - protein, 520 aa, Streptococcus suis 89/1591
MRVIEFLDTTLRDGEQTPGVNFSIKEKVTIAKQLEKWGISAIEAGFPAASPDSFEAVRQIAAAMTKTAVTGLARSVKSDIDACYEALKDAKYPQIHVFIATSPIHREFKLQKTKEEILAQITEHVSYARERFEVVEFSPEDATRTELDYLLEVVQTAVDAGATYINIPDTVGFTTPQHYGEIFRHLITNVKSDREIIFSPHCHNDLGMAVANTLSAIKNGAGRVEGTINGIGERAGNAALEEVAVALEIRKDFYDVTSPIVLKEMLNTSELVSRFSGIAIPRNKAVVGGNAFSHESGIHQDGVLKNPLTYEIITPELVGVKKNSLPLGKLSGRHAFVEKLKELDLYFEEGDVASLFARFKNLADKKEKITDADIRALVAGTEISNRDGFQFKDLRLDSQSDGSIQAQVIFINQDEEEVVVAESGKGSVEAVFNAVDQFFHQEISLERYHIDAITDGIDAQARVLVAVENKATETIFNASGIDFDVVKASAIAYIHANVMVQKENSGQIDKKLSEKELPTS

SEQ ID NO: 6927 - DNA, 1623 bp, Synechococcus sp. RS9917
  CDS (1)..(1623): transl_table=11
atggccaaggaccccggccgcgttctgatcttcgataccaccctgcgggatggtgaacagtcgcctggcgccagcctcaacctggaggagaagctggcgatcgcgcagcagctggcccggctcggtgtcgacatcatcgaagccggatttccctttgccagtgccggcgatttcgaggcggtgcagcgcatcgcccaacaggtgggtggtgcgcaggggccgatcatctgcggcctcgcccgcgcctcccgtggcgatatcaaggcctgtgccgatgcggtggccccagccccgcgccgccgcatccacaccttcatcgccaccagcgacatccacctcgagcacaagctgcgcaagagccgcaaggaggtgctggcgattgttcccgagatggtcgcgtatgcccgctccctcgtcgacgacgtcgagttctcctgtgaggacgccggccgcagtgatccggagtttctctacgaggtgatcgaagcggcgatcgcggctggtgctggcacgatcaacattcccgacaccgtcggctacaccaccccggcggaattcggtgccctgatcgccggcatcgatcagcacgtgcccaacatccaggaggcggtcctgtcggtgcatggccacaacgatctgggcctggccgtggccaatttccttgaggcggtcaagaacggggcccgtcaactcgagtgcaccatcaatggcatcggcgaacgggccggtaatgcggccctggaggagttggtgatggccctgcatgtgcgccgccgctacttcaatccttttttgggtcgcgacgaggagtccccgacgccgctcacggccgttcgcaccgaggagatcaccaagacctcccgcttggtgtcgaatctcaccggcatggtggtgcaacccaacaaggcgatcgtgggtgccaacgctttcgcccacgagtcgggcattcaccaggacggcgtgctcaagaaccggctgacctatgaaattgttgatgcccgcaccgtcggcctcagcgataaccgcatctccctgggcaaattgagtggtcgcagtgccgtgcgcgctcgcctcgaggagctgggctacgacctcagccgcgaggatctcgatgaggcctttgcccgcttcaaggatctggccgatcgcaagcgtgagatcaccgatcgcgatctggaagcgatcgtgagcgagcaggtgcagcagcccgaggcccgctaccagctcaagctggtgcaggtgagttgtggcagcagcctgcggcccaccgccaccgtcaccctggccgacgaagaggggcgggaacagaccgcggccgcgatcggcaccgggccggtggatgcggtgtgtcgggcgctcaatgctctggcggaggagcccaaccagctggtggagttctccgtgaaatcggtcaccgagggcatcgacgccatgggggaggtcacgatccggttgcgccgcgacggtgcgctctattccggccattccgctgacaccgatgtggtggtggcggcggcccaggcgttcgtcaatgccctcaaccgcctggtggccggtgcgtcccgctccgccatccacccccagcgcgatcatgcggtcctggagacccgcccgagcctctga

SEQ ID NO: 6928 - protein, 540 aa, Synechococcus sp. RS9917
MAKDPGRVLIFDTTLRDGEQSPGASLNLEEKLAIAQQLARLGVDIIEAGFPFASAGDFEAVQRIAQQVGGAQGPIICGLARASRGDIKACADAVAPAPRRRIHTFIATSDIHLEHKLRKSRKEVLAIVPEMVAYARSLVDDVEFSCEDAGRSDPEFLYEVIEAAIAAGAGTINIPDTVGYTTPAEFGALIAGIDQHVPNIQEAVLSVHGHNDLGLAVANFLEAVKNGARQLECTINGIGERAGNAALEELVMALHVRRRYFNPFLGRDEESPTPLTAVRTEEITKTSRLVSNLTGMVVQPNKAIVGANAFAHESGIHQDGVLKNRLTYEIVDARTVGLSDNRISLGKLSGRSAVRARLEELGYDLSREDLDEAFARFKDLADRKREITDRDLEAIVSEQVQQPEARYQLKLVQVSCGSSLRPTATVTLADEEGREQTAAAIGTGPVDAVCRALNALAEEPNQLVEFSVKSVTEGIDAMGEVTIRLRRDGALYSGHSADTDVVVAAAQAFVNALNRLVAGASRSAIHPQRDHAVLETRPSL

SEQ ID NO: 6929 - DNA, 1623 bp, Synechococcus sp. WH 5701
  CDS (1)..(1623): transl_table=11
atggccaaggaccccggccgcgttctgatcttcgacaccaccctccgggatggtgagcaatcccccggggccagcctcaacctggaggagaagctggcgattgcccatcagcttgcgcgcctgcgcgtcgacatcattgaagccggctttcccttcgccagccccggtgatttcaatgcggttcagcgcatcgccgccgctgtcggcacccccgaagggccggtgatctgtggcctggcccgggctgcccgcggcgacatcaaggcctgcgcagaagcggtggcccccgccgccaaccgccgcattcacaccttcatcgccaccagcgacatccatctggagcacaagctgcgcaagagccgcgccgaggtggtggcgatcaccgcagagatggtggcctatgcccgctccctcgtcgaggacgtggaattctcctgcgaggacgctggccgctccgatcctcactacctctatgaggtgatcgaggccgccatcgctgctggcgccaccacgatcaacatccccgacaccgtgggctacaccaccccggccgaattcgggggcctgatcgccggcattgaggcccatgtgcccaacattgatcaggcggtgatctcggtgcacggccataacgacctcggtctggcggtggccaacttcctcgaggcggtcaagaacggtgcccgccagctggagtgcacgatcaacggtatcggcgagcgggccggcaacgcctctctcgaggagctggtgatggcgctgcatgtgcgccgggcctatttcaaccccttcctcggccgccaggccagcagcagcgagccgctcacaggggtgcgcaccgaggagatctacaagacttcccgcctggtgagtaatctcaccggcatggcggtgcaacccaacaaagcgatcgtgggtgccaacgcctttgcccatgaatcgggcatccatcaggacggtgtgctcaagaaccgcctcacctacgagatcgtcgatgcccgcaccatcggcctggccgacaaccgcatctccctcggcaaactgagcggccgcagtgccttccgggcgcgcctggaggatctgggttacaccctcgagcgcgacgacctcgacgaggctttcgcccgcttcaaggagctggccgatcgcaagcgggaaatcaccgaccgggatctcgaggcgatcgtgagtgatcaggcccagcagaccgaggcccgttacgtgctcaagctggtgcaggtgagcacgggcaccaacctgcagcccaccgccaccgtgactctcaccaccagtgatggcgccgagctcaccgaggccgccatcggcaccggtccggtcgatgccgtctgccaggccctcaacagcctggcgcgggtgcccaacgagctggtggagttcagcgtcaagtcggtcaccgagggcatcgatgccatgggcgaggtcacgatccgcctgcgccaccatggggttctctacgccggccatgccgctgacaccgacatcgtggtggctgcggcccaggccttcgtcaatgccctcaaccggctggtgcacgggatggagcgtcagcccctgcatcctcagaaagcgtcgctgccggtggcggagctgccgcggctgtga

SEQ ID NO: 6930 - protein, 540 aa, Synechococcus sp. WH 5701
MAKDPGRVLIFDTTLRDGEQSPGASLNLEEKLAIAHQLARLRVDIIEAGFPFASPGDFNAVQRIAAAVGTPEGPVICGLARAARGDIKACAEAVAPAANRRIHTFIATSDIHLEHKLRKSRAEVVAITAEMVAYARSLVEDVEFSCEDAGRSDPHYLYEVIEAAIAAGATTINIPDTVGYTTPAEFGGLIAGIEAHVPNIDQAVISVHGHNDLGLAVANFLEAVKNGARQLECTINGIGERAGNASLEELVMALHVRRAYFNPFLGRQASSSEPLTGVRTEEIYKTSRLVSNLTGMAVQPNKAIVGANAFAHESGIHQDGVLKNRLTYEIVDARTIGLADNRISLGKLSGRSAFRARLEDLGYTLERDDLDEAFARFKELADRKREITDRDLEAIVSDQAQQTEARYVLKLVQVSTGTNLQPTATVTLTTSDGAELTEAAIGTGPVDAVCQALNSLARVPNELVEFSVKSVTEGIDAMGEVTIRLRHHGVLYAGHAADTDIVVAAAQAFVNALNRLVHGMERQPLHPQKASLPVAELPRL

SEQ ID NO: 6931 - DNA, 1548 bp, Pseudoalteromonas tunicata D2
  CDS (1)..(1548): transl_table=11
atgagcgataaagtttggatttttgatacaacactacgtgatggtgaacaagccttaaaagcaagcttgactgaagatgataaattacaactcgctcatactattagccgactgaatgtagatgtcatggaggtggggtttccagtatcaagcccagcagattttcgctcggtgcagcgtattgcaactgaagtaaaaggaccaattatttgtggtttagcgcgggcagttgtgaaagatattgaagcgtgtggcgaagcgcttcgccctgctgagcagcgccgtattcatacttttattgccacaagtccattgcatcttgaacataagttacgaatgagtttagaccaagcaactgaaatggcagttaagtcgataaagttagcgcgtaattacaccgatgatgttgaattctcatgtgaagatgcagggcgtactccacatgatgatttatgccgtattgttgagcgcgcaattgctgcaggtgcttctaccatcaatcttcctgatacggtcggatatgttactccgcaagaatatgcggcgatgatcagtcatttaatgaataacgtgcctaacattgataaagcgcgtttaagtgtgcattgccacaatgatttaggtttagccgtggcgaactcgattgctgcagtgcaagcaggtgcgcgtcaaatcgaatgtactatcaatggtattggtgagcgagccggtaactgttcgatggaagaagtggcaatgattttaaaaatgcgtcacgactaccttaatttgcataccgatattaatagtgaggaaatttatcgagcgtcgcgtcaagtaagccaaatttgcaacatgccagtgcaaccgaataaagcgattgtcggtgaaaatgccttcgcgcatagttcgggtattcatcaagatggtgtattaaaagcacaaaatacctatgaaattatgtcaccagaaacagtgggtgtgccaagcaaccaattaaatatgacttcgcgctcaggccgtcatgttattcaacatcgtttaagtgagcttggctatcaaaccggcgattatgatatggaaagcttatatgaaagctttttagccttggcagatcaaaagggcacagtgtatgactatgaccttgaagcaatgatccactttaataaaatcagtgataaagatgactattatcagctggattttgttaattcaacatcgaattcacagtcagttgccagcagcacagttggcttggtcattggtggtgaaaaagtctctgaagccgcgaccggcaatggccctgttgaggcatcttataaggcgattaagcgcattacagcaatggatgttgaagtgattgaatacaaccttgatgcaactggcgcgggtgaaagctcactgggccaagttgatatcatcgccaaatttgatggtaaacaatatcacggtgcaggccttgcagccgatattgtagaggcatcagtccgcgctatggtacgagtttacaatttaatttatagggcgcagcaagtgtctgatataaaacaacaaaggaaagcaggatga

SEQ ID NO: 6932 - protein, 515 aa, Pseudoalteromonas tunicata D2
MSDKVWIFDTTLRDGEQALKASLTEDDKLQLAHTISRLNVDVMEVGFPVSSPADFRSVQRIATEVKGPIICGLARAVVKDIEACGEALRPAEQRRIHTFIATSPLHLEHKLRMSLDQATEMAVKSIKLARNYTDDVEFSCEDAGRTPHDDLCRIVERAIAAGASTINLPDTVGYVTPQEYAAMISHLMNNVPNIDKARLSVHCHNDLGLAVANSIAAVQAGARQIECTINGIGERAGNCSMEEVAMILKMRHDYLNLHTDINSEEIYRASRQVSQICNMPVQPNKAIVGENAFAHSSGIHQDGVLKAQNTYEIMSPETVGVPSNQLNMTSRSGRHVIQHRLSELGYQTGDYDMESLYESFLALADQKGTVYDYDLEAMIHFNKISDKDDYYQLDFVNSTSNSQSVASSTVGLVIGGEKVSEAATGNGPVEASYKAIKRITAMDVEVIEYNLDATGAGESSLGQVDIIAKFDGKQYHGAGLAADIVEASVRAMVRVYNLIYRAQQVSDIKQQRKAG

SEQ ID NO: 6933 - DNA, 1545 bp, Photobacterium sp. SKA34
  CDS (1)..(1545): transl_table=11
atgaaagatcaggtcattattttcgatactacgctacgtgacggtgaacaagcgttgtcggcaagccttaccgtaaaagaaaaactacagatcgcatacgcattagagcgtttaggtgttgatgtgattgaagcaggctttcctgtgtcatccccaggcgattttgagtcagtacaaaccatcgcgaaacacatcaaaaacagtcgtatttgtgcactatcccgagcggtagcaaaagatattgatgttgcggctaagtcattaaaagtcgcagaagctttccgcattcatacctttatttcaacctcaaccgttcacgtgcaagacaagctacgtcgtagctatgatgatgtcattgatatgggtgtcgcagctgtaaagcgtgcgcgtaattatactgatgacgttgagttctcatgtgaagatgctggccgtacaccgatcgataatctatgccgcatggtagaagcagctatcgacgcgggggctaacaccattaacatccctgacaccgtgggttacaccctgccgagtgaatttggcggcattatcacccagctatttaatcgcgttccaaacatagataaggcagtgatttctgtccactgtcacgatgatttaggcatgtctgttgccaattcaatggcggccgttcaagcaggtgctcgtcaggtagaaggaaccattaatggtctaggtgagcgtgctggtaactgctcactagaagaaattgcgatgatcatcaaaactcgtcaggagttactgggtgtaacaaccaatatcaaacacaatgaaattcaccgaaccagtaaaatggttagtcagttgtgtaatatgccaattcaagccaataaagcgattgtcggtgccaatgcctttagtcactcatcgggtattcaccaagatgggatgctaaaaaataaaaacacctatgagatcatgacgcctgaatcgattggccttaaaaaccaagcactaaacctaaccagtcgctctggtcgtgcggctgttaaaagtcacatggatgcattaggctacaccgagaacgaatatagcctagataaactgtatgctgatttcttaaaactggcagatcgaaaaggccaagtgtttgattatgacttagaagcgctgatgcatttttctaaccttcgtgatgaagatgactacttcaaactgaactacctaagtgttcaatcaggtagtgttatggcaacgaccagcatcaagctattgtgtggtgacgaagaaaaatgtgaagcggcagtcggtaatggtcctgtcgatgcgttataccagtgtatttaccgcctaacaggttatgacattgtactggataaatttgatttaaccgcaaaaggcgaaggtgaagacggcttaggacaagcagatatcatcgctaattataaaggcagaaaataccacggaacgggcttagcaaccgatattgtagaagcgtctggtcaagcgttactgcacgttatcaacagcattcaccgtgcagatcaaattgaagaaattaagcaacgctcagcaactcactag

SEQ ID NO: 6934 - protein, 514 aa, Photobacterium sp. SKA34
MKDQVIIFDTTLRDGEQALSASLTVKEKLQIAYALERLGVDVIEAGFPVSSPGDFESVQTIAKHIKNSRICALSRAVAKDIDVAAKSLKVAEAFRIHTFISTSTVHVQDKLRRSYDDVIDMGVAAVKRARNYTDDVEFSCEDAGRTPIDNLCRMVEAAIDAGANTINIPDTVGYTLPSEFGGIITQLFNRVPNIDKAVISVHCHDDLGMSVANSMAAVQAGARQVEGTINGLGERAGNCSLEEIAMIIKTRQELLGVTTNIKHNEIHRTSKMVSQLCNMPIQANKAIVGANAFSHSSGIHQDGMLKNKNTYEIMTPESIGLKNQALNLTSRSGRAAVKSHMDALGYTENEYSLDKLYADFLKLADRKGQVFDYDLEALMHFSNLRDEDDYFKLNYLSVQSGSVMATTSIKLLCGDEEKCEAAVGNGPVDALYQCIYRLTGYDIVLDKFDLTAKGEGEDGLGQADIIANYKGRKYHGTGLATDIVEASGQALLHVINSIHRADQIEEIKQRSATH

SEQ ID NO: 6935 - DNA, 1215 bp, Desulfitobacterium hafniense DCB-2
  CDS (1)..(1215): transl_table=11
gtgaacggaaagtggtggacgaaggattggtgggtaagcgaatacaattaccacgaagaagtagtcaaggatttgcaccttccccaaaagattgagatacacgacgcgacgctgcgggatggggaacagactcccggcgtggtgttcagcaaagaggataaagtaagaattgccgaattgctggccgaagtgggagttgagcggattgaagccggcatgccggcggtatccaaagatgatgcccaagcgattgaggagatcgccaaacgcaatttgggacccaagattatggtattctgccgggcgatgcgggaggatgtggatcgggccgtggattgcggagcagatgggatcgttctggaagcgcccagcggctatccgaagcttaaatatcaatttgccagtaagtggacggaagaaagcctgaccgaagccgtcgtcaataccatcaattacgccaaggaaaaggggctgtttgtcaactatttcccctttgatacgaccagagcggaacttccttttctcaagcggcttctgaccaatgtaacaactcaagccaaaccggattcggtaacggtggtcgataccacaggttcgatcactcccaccgccatgcgttttctggtcaggcaggtcagggaaaccatcgctctgcccctggaagttcatacccacaacgatttcgggctgggcacagccacgaccttcgccgcggtggaggaaggtgtgcaggtcgtgcacagctgcatcaacggtttgggtgagcggaccggcaatactgctctggaagagatagctctgggcttaaagctgctctatggcatagagctgcccaaattcaacttccagaaactgagtgagctttcccaggaagtgcaaaggatgtccggcaagaccctggcccaaaacaagccggtggtcgggctgctgccttttacccgggagattggcttgggaatgaaagttctggaagattacccgacggctgttttcccttttatgccggattttgtgggtcaaaaaatgaaaatcgtcatgggcaagaaaagcggcaaggaatccgttctgatgaagcttgaggcggcagggttaaaggccaatgaagagcaggtacaggaaattgttgcgcgcaccaaagctgccgggatcgccaaacgcaactggcttgaagacgaggagttcttggtgatcgcacgtcaggtattggaccgttaa

SEQ ID NO: 6936 - protein, 404 aa, Desulfitobacterium hafniense DCB-2
MNGKWWTKDWWVSEYNYHEEVVKDLHLPQKIEIHDATLRDGEQTPGVVFSKEDKVRIAELLAEVGVERIEAGMPAVSKDDAQAIEEIAKRNLGPKIMVFCRAMREDVDRAVDCGADGIVLEAPSGYPKLKYQFASKWTEESLTEAVVNTINYAKEKGLFVNYFPFDTTRAELPFLKRLLTNVTTQAKPDSVTVVDTTGSITPTAMRFLVRQVRETIALPLEVHTHNDFGLGTATTFAAVEEGVQVVHSCINGLGERTGNTALEEIALGLKLLYGIELPKFNFQKLSELSQEVQRMSGKTLAQNKPVVGLLPFTREIGLGMKVLEDYPTAVFPFMPDFVGQKMKIVMGKKSGKESVLMKLEAAGLKANEEQVQEIVARTKAAGIAKRNWLEDEEFLVIARQVLDR

SEQ ID NO: 6937 - DNA, 1164 bp, Desulfitobacterium hafniense DCB-2
  CDS (1)..(1164): transl_table=11
gtggaggaaagaaaattaaccatcgtggacacgacattgcgggatggagaacagaccgcaggagtagtattttctaatcaggagaagctgatgattgcccggatgctggatgatctcggtgtccatcagattgaagccggggttccggtcatgggcggcgatgagcagaaggcaatccgtgatattgttaaaatgggtttgaaagccagtattatgggatggaaccgggcggtcatagccgatattgaaaaatccattgaatgtggatgcgatgcggtggctatatccatttccacctcagatattcatatcgaacataaactgatgaccacacgggaagacgttttggccagaatggtcaaggctgctgaatttgccaagagaaacgggctttacatatccgtgaatgcggaggatgcctcccgttccgatctggattttctcctggaatttgctcgtcaggccaaagaggcgggggcagaccggcttcgctattgcgatacggtggggatccttgagcctttcacgacctttgagcgaatcacgaagctcaaagaaaccatcgatatcgatgtggagatgcatactcataatgactttggtatggcaacggccaatgccttagccggtgtgaaagcgggagccagccatattggggtaacggtcaacggcttgggcgagcgggccggtaatgcagctttagaggaaattgtcatggccctgaagtatttggccggagtcgatctgaaatttgccacagagcgttttgtcgaggtttcagagtttgtagcgagagcgtcaggacgttctgttcctgcctggaaggctatcgtgggcagcaatatgtttgcccatgagtcggggattcacgctgatggggctttgaaaaatcccctcacttacgaagtgtttaaaccggaggaagtgggcctggagcgtcagattgtgattggcaagcactcgggaactgcggccatcaaagctaagttccgcaatgaatacggcaaagagatttccgaggaagaagccaatgagctgctggcccgggtaagagcttttgctgtggatatgaagcgctccctttttgataaggagctcatgtatatttacgaagatttgcatagggaagcggaaaatcgtcaacctaacccaaagtggttttaa

SEQ ID NO: 6938 - protein, 387 aa, Desulfitobacterium hafniense DCB-2
MEERKLTIVDTTLRDGEQTAGVVFSNQEKLMIARMLDDLGVHQIEAGVPVMGGDEQKAIRDIVKMGLKASIMGWNRAVIADIEKSIECGCDAVAISISTSDIHIEHKLMTTREDVLARMVKAAEFAKRNGLYISVNAEDASRSDLDFLLEFARQAKEAGADRLRYCDTVGILEPFTTFERITKLKETIDIDVEMHTHNDFGMATANALAGVKAGASHIGVTVNGLGERAGNAALEEIVMALKYLAGVDLKFATERFVEVSEFVARASGRSVPAWKAIVGSNMFAHESGIHADGALKNPLTYEVFKPEEVGLERQIVIGKHSGTAAIKAKFRNEYGKEISEEEANELLARVRAFAVDMKRSLFDKELMYIYEDLHREAENRQPNPKWF

SEQ ID NO: 6939 - DNA, 1623 bp, Synechococcus sp. RS9916
  CDS (1)..(1623): transl_table=11
atggccaaggaccccggccgcgttttgatcttcgacaccaccctgcgggatggtgagcaatctcctggcgccagcctcaatcttgaagagaagctggccattgcccagcagctggcgcgcctgggcgtcgacgtgatcgaggcggggttcccctttgccagccccggggatttctcggccgtgcagcgcattgcccagcaggtgggcggcgaaaacggtccgatcatctgcggcctggcgcgcgcctcccgcgctgatatcaaggcctgtgctgatgctgtagcgccggcgcctcgccgtcgcattcacaccttcatcgccaccagcgacatccacctcgaacacaaattgcgcaagagccgcaaggaggtgctggcgatcgtgccggagatggtggcctatgcccgctctctggtggatgacgtggagttctcctgcgaagacgcaggccgcagcgatcccgagtttctttacgaggtgatcgaggccgccatcgctgccggcgccagcaccatcaacattcccgacacggtcgggtacaccaccccgtcggaatttggtgccctgattggtggcatcaacacccacgtgcccaacatcgatgaagcggtgttgtcggtgcacggccacaacgatctcggcctggcagtcgccaatttcctcgaggcggtgaaaaacggagcacgccagttggagtgcaccatcaacggcatcggtgaacgggccggtaacgctgcgctggaagaactggtgatggcgttgcacgtgcgtcgccgctactacaaccccttcttcggtcgagcagaggattcacctacgccgctcacggcggtgcgcacggaggaaatcaccaaaacttcccgcctggtgtcgaatctcaccggcatggtggtgcagcccaacaaggcgatcgtgggggccaacgcctttgcccacgagtcgggtatccatcaagacggggtgctgaagaaccggctcacctacgaaatcgttgatgcccagaccgttggcctcagcgacaaccgcatttccctgggcaagctcagtggccgcagtgctgtgcgcgctcgcttggaagagctcggctacgacctcagccgcgatgatctcgatgaagcgtttgcccgtttcaaagatctggctgatcgcaagcgtgaaatcaccgatcgtgatctagaagcgatcgtgagcgagcaggtgcagcaacctgaagcccgttatcagctgaagctcgtgcaggtgagctgcggcagcagccttcagcccacggccacggtcaccctggccgatgaagaggggcaggagcagaccgctgcttccatcggcaccggtccggtggatgcggtgtgtagggccctgaatgccctggcaggcgttcccaatgagttggtggagttttcggtgaagtccgtcaccgaaggcattgatgccatgggtgaggtgaccattcgccttcgccgcgatggccaacttttctccggtcattcggccgacaccgatgtggtggtggcggcagctcaggcgtttgtgaatgccctcaaccggctcgttgccgggcagcaccatcagcccatccacccgcagcgagacaccgctgaggtgtccgcccgcccgagcctctga

SEQ ID NO: 6940 - protein, 540 aa, Synechococcus sp. RS9916
MAKDPGRVLIFDTTLRDGEQSPGASLNLEEKLAIAQQLARLGVDVIEAGFPFASPGDFSAVQRIAQQVGGENGPIICGLARASRADIKACADAVAPAPRRRIHTFIATSDIHLEHKLRKSRKEVLAIVPEMVAYARSLVDDVEFSCEDAGRSDPEFLYEVIEAAIAAGASTINIPDTVGYTTPSEFGALIGGINTHVPNIDEAVLSVHGHNDLGLAVANFLEAVKNGARQLECTINGIGERAGNAALEELVMALHVRRRYYNPFFGRAEDSPTPLTAVRTEEITKTSRLVSNLTGMVVQPNKAIVGANAFAHESGIHQDGVLKNRLTYEIVDAQTVGLSDNRISLGKLSGRSAVRARLEELGYDLSRDDLDEAFARFKDLADRKREITDRDLEAIVSEQVQQPEARYQLKLVQVSCGSSLQPTATVTLADEEGQEQTAASIGTGPVDAVCRALNALAGVPNELVEFSVKSVTEGIDAMGEVTIRLRRDGQLFSGHSADTDVVVAAAQAFVNALNRLVAGQHHQPIHPQRDTAEVSARPSL

SEQ ID NO: 6941 - DNA, 1554 bp, Alteromonadales bacterium TW-7
  CDS (1)..(1554): transl_table=11
atgcaagacaaagataaagtatggatttttgataccactttacgtgatggcgagcaggcacttaaggcaagccttactgaagatgataaaattcagttagcgcatactattagccgtttgaatgttgatgtgatggaagtgggttttccggtatccagccctgctgactttcgctcggtgcaacgaattgcaactgaagtaaaaggtccaattatttgtggtttagcacgctctgtagcaaaagatattgaagcctgtggtgaggcacttcgcacagcacagcaaagccgtattcatacttttattgccacaagccctttgcaccttgaacataaattacgtatgagccttgatgacgcaacggccatggcggttaaatcaattaaattagcgcgtaactacacagacgatgtggagttttcgtgtgaagatgcagggcgcacgccgcactgggatttatgtaaaattgttgagcaggccattaaagcaggtgcctctactattaatttacccgacaccgttggctttgttacgccagatgaatacgccgcgatgatccgccatttaatgaataatgtgccgaatatagataaagcgcgtttaagtgtacattgtcataacgatttaggtttagctgtagctaactcggtcgccgcggtacaagcgggggctcgccaaattgaatgtacaataaatggtattggtgagcgtgcgggtaactgttcgcttgaagaagtggcgatgatcatgaaaatgcgcaaagaccacttaaaagttcacaccgatattaaaagcgaagaaatttatcgcgcatctcgccaagtggcaaaaatttgtaatatgccagtacagccaaataaagccattgtgggcgaaaatgcctttgcacatagctcgggtattcaccaagatggcgtattaaaagcacaaaatacgtacgaaataatgtcgccagaaagcgtaggcgtaccaaacaaccaattaaacatgacctcgcgttcgggccgtcatgttattgagcaccgcttagaagagttagggtatcaaaaagcggattacgatatggacagcctatacgaaagctttttagcgttagctgatcaaaaaggcacggtgtacgactacgaccttgaagccatgatttacttaaatcaaattaacgacaaagacgaaaaataccagttagagtttgttaactcagcgtctaactcgcaatcggtagccagctctactattggtatggtgattgatggcgaagttaagcaagaagccgcaacaggtaatggcccagtagaggcgtcgtttgcagctattgagcgcttaaccggtatgagcgttgaaatgattgaatataacttagaagcgacaggccaaggtgcaagctcattaggccaagtaaatattatagctaaatacgatggccgcccttaccacggtgcgggcattgcagcggatgtggtagaagcgtcggtacgcgccatgatccgtgtttacaacttaatttatcgtgcacaaaaagtgtctgatttaaaacaacaaaggaaagcaggatga

SEQ ID NO: 6942 - protein, 517 aa, Alteromonadales bacterium TW-7
MQDKDKVWIFDTTLRDGEQALKASLTEDDKIQLAHTISRLNVDVMEVGFPVSSPADFRSVQRIATEVKGPIICGLARSVAKDIEACGEALRTAQQSRIHTFIATSPLHLEHKLRMSLDDATAMAVKSIKLARNYTDDVEFSCEDAGRTPHWDLCKIVEQAIKAGASTINLPDTVGFVTPDEYAAMIRHLMNNVPNIDKARLSVHCHNDLGLAVANSVAAVQAGARQIECTINGIGERAGNCSLEEVAMIMKMRKDHLKVHTDIKSEEIYRASRQVAKICNMPVQPNKAIVGENAFAHSSGIHQDGVLKAQNTYEIMSPESVGVPNNQLNMTSRSGRHVIEHRLEELGYQKADYDMDSLYESFLALADQKGTVYDYDLEAMIYLNQINDKDEKYQLEFVNSASNSQSVASSTIGMVIDGEVKQEAATGNGPVEASFAAIERLTGMSVEMIEYNLEATGQGASSLGQVNIIAKYDGRPYHGAGIAADVVEASVRAMIRVYNLIYRAQKVSDLKQQRKAG

SEQ ID NO: 6943 - DNA, 1566 bp, Moritella sp. PE36
  CDS (1)..(1566): transl_table=11
atgtcagaccaggttattatttttgatacgaccttgagggatggagagcaagcattatctgcaagcttaaccgtaaaagaaaaattacaaatcgcctttgcacttgagcgcttaggtgttgatgtaatggaagttggttttccaatttcatcacctggtgattttgaatccgtgcagacgattgcacgtaatattaaaaatagtcgtgtttgcgccctttctcgcgcgcttgaaaaagatattgatgctgctgcccaagcgctttcagttgctaaagacttccgtattcatacctttatttcaacctctgatattcatgttaaaagtaaactaaaacgtagctttgacgatgtcctcaatatgggtcgccacgccattaaacatgcacgtcgctatactgatgacgttgagttttcttgtgaagatgccggccgtaccccaatcgataatctatgtcgtatggttgaagaagccattaaagccggtgcaacaacgattaacattccagataccgttggttataccgtgccatcgcaattcggcggcatcatcaccgacttattcaatcgcgtgccaaatattgataaagccgtgatctcggtacattgtcatgatgaccttggcttatcggttgcgaactccattgctgccatacagcaaggtgctcgtcaaatcgaatgtaccatcaatggtattggtgaacgcgcaggtaactgttcattagaagaaatagccatgatcttgcacacacgccaagatttattaggtaaaaccaccaatattaacgcacaagaaatttaccgaaccagccagctagtcagtcaactctgcaacatgccagtacaggctaataaagcgattgtgggtgctaacgcattttcacattcctcaggtattcatcaggatggcgtactgaaagcaaaaaatacttacgaaattattaccccagaaagtattggtctaacgcaaaacaagttaaatctgacctcacgttctggtcgtcatgtgatcaaacatcgtatggcagagctgggttataccgacaatgattataatcttgaagagctgtatgaaagcttcttacaacttgcagataaaaaaggtcaagtattcgattatgaccttgaagcattaatcttctttaataatttgcacgaagatgaagcacattttaaattagattatctcagtgttcagtccggttctggcgtgaaagcaaccgcaacaattagcttaatttcacaattagaaacaacgggtgaatctcgtacagatactgaagcggcgataggtaatggtccagttgatgcggtttataaatgtttaagccgtatttctggcttcgatatcgatattgccgattatcacatcactgcaaaaggtgaaggtaaagacgcactgggtcaagtcgatattgtcgcaacgtatgaaggccgtaagttccacggtatcggcttagcaaccgatatcatcgaatcgtcggcgctggcttatatccacgtaatgaataatatccatcgcgccaacgcggtagaacaacagaaacttaaaaaacaaaatcaataa

SEQ ID NO: 6944 - protein, 521 aa, Moritella sp. PE36
MSDQVIIFDTTLRDGEQALSASLTVKEKLQIAFALERLGVDVMEVGFPISSPGDFESVQTIARNIKNSRVCALSRALEKDIDAAAQALSVAKDFRIHTFISTSDIHVKSKLKRSFDDVLNMGRHAIKHARRYTDDVEFSCEDAGRTPIDNLCRMVEEAIKAGATTINIPDTVGYTVPSQFGGIITDLFNRVPNIDKAVISVHCHDDLGLSVANSIAAIQQGARQIECTINGIGERAGNCSLEEIAMILHTRQDLLGKTTNINAQEIYRTSQLVSQLCNMPVQANKAIVGANAFSHSSGIHQDGVLKAKNTYEIITPESIGLTQNKLNLTSRSGRHVIKHRMAELGYTDNDYNLEELYESFLQLADKKGQVFDYDLEALIFFNNLHEDEAHFKLDYLSVQSGSGVKATATISLISQLETTGESRTDTEAAIGNGPVDAVYKCLSRISGFDIDIADYHITAKGEGKDALGQVDIVATYEGRKFHGIGLATDIIESSALAYIHVMNNIHRANAVEQQKLKKQNQ

SEQ ID NO: 6945 - DNA, 1164 bp, Moritella sp. PE36
  CDS (1)..(1164): transl_table=11
atgaaaaaaatatcaatactggatacaacactaagggatggtgaacaagctcccgaaaatgcaatggatccggagaaaaaactcaaaatggccttgatgcttgaagagtgcggcgtagaccatatcgaaacgggattcccagcatcttcaaaatttgactatgaagcgacaaagctgatcagcaaagaagttacacagtcaggtatagctactttttctagaacactaacaagtgatgtccaattatcactagaatcaggtggacgtgaaaaaaatcacactattcaaatggtggcgacaggtagcgatcttcatttaaagaacaaacgaaatatttctcgatctcaagcaattgaagaagtaatcaacaccgtaaaattcgccaaacaaaatagtgactgcagaattgcagttgggattgaggacgcgagccgagcagattttgattttatgggtgaaataacagaggcagcagtgtttgcaggtgcgcatcaaataattcttgcggatacaactggctacgcgacaccgtctgaatttaagaaattgattcaatttattagatccaaaactggcgacggtatcagtatttcaacacactgccataacgaccttggcctggcgcatgcgaacacacttgcgggtatagagggtggtgcagatgaagttcaagttacattagggggaataggtgaacgtgccggtaatgcttcgcttgagatgatagcctcaactctgttctttaagcctgaatgttattcttcttttaccgacataaagctagacaaattgtataaagtttatcaagaactttgctctgaaattggtctagacattccaagaaaccaacctgtttttggtacttacgctttctcaactgctgccggtatccatcaacagggggtcttggctaaccccgatacgtatgagttcgtgaaaccagatgtgtttaatcgtgaacgtgaattttttgtatcacgtcattctggtaaatccatcatcaaatacattctttctaataaagctatggatcaagacccgaaattacttgaaaccctatacgctaactgtattagcagccgtgccgaaaatagctgtttaagtatgattgagttggaatttgaaattgataaattcatgaaaaccttttgtaaggtggcttaa

SEQ ID NO: 6946 - protein, 387 aa, Moritella sp. PE36
MKKISILDTTLRDGEQAPENAMDPEKKLKMALMLEECGVDHIETGFPASSKFDYEATKLISKEVTQSGIATFSRTLTSDVQLSLESGGREKNHTIQMVATGSDLHLKNKRNISRSQAIEEVINTVKFAKQNSDCRIAVGIEDASRADFDFMGEITEAAVFAGAHQIILADTTGYATPSEFKKLIQFIRSKTGDGISISTHCHNDLGLAHANTLAGIEGGADEVQVTLGGIGERAGNASLEMIASTLFFKPECYSSFTDIKLDKLYKVYQELCSEIGLDIPRNQPVFGTYAFSTAAGIHQQGVLANPDTYEFVKPDVFNREREFFVSRHSGKSIIKYILSNKAMDQDPKLLETLYANCISSRAENSCLSMIELEFEIDKFMKTFCKVA

SEQ ID NO: 6947 - DNA, 1131 bp, Cyanothece
  CDS (1)..(1131): transl_table=11
atgaatcatgtccatgttaatgatacaaccctacgggatggagaacaagcagccggtattgtttttagtgccatcgaaaaaatagcgatcgcttgtttaatggatgccatcggtattcctgagttggaagtgggtattcctgcgatgggaggctctgaagccgaaagccatcaccgccattgtccaaaaaggttaaaaaccgccctcttaggtttggaaccgtgcggtagttcggatattgaagcctccattgcctgtggcttgagaagggttcatatctcggttcctgtatcagacatacaaattaaggcaaaatttaaaggaaaaactaatcttgtttgggatcggttacgagatagtattaattttgcgctagatcacgatttattcgtttctgtgggggctgaagatgcttcacgggcagatgagtcctttttagtggaagtagctcaatttgccgaaagtttaggggcttctcggttccgtttctgcgatacggtgggcattcttaaccctttaaccacggctcaaaaagtgggaaaattggtgaagtctatcaagatgcctatcgaaatgcacacccataatgattttggcttagccaccgccaatgctttagcggggttgcaagcaggtgcggtttcggtgaataccaccgttaatgggttaggagaaagggcaggtaacgcagccttagaagagatgatcatggctctcaaacgactctatcaggttgatttagggatggagagttctcgtctacgagaactatctcaactggtggttaaagcctccggtattccccttcccccttggaaagcgatcgttgggacaatgtttgcccacgagtctggtattcatgctcatggtgtcttacaaaacccccaaacctacgaacccttttccccagatgaggtaggttggaaacgccgtttagtggtgggtaagcattcgggacgacatttattgaccaatttattgagtcaacatggcattagtttaaaccatgaagagtcccaagtggtgttagactcggttcgtcatttatcggtacaaatgaaacgcagtctaacggttgaggagttaattgatgttgtaaccaataggagtatgtctcatgggattgtataa

SEQ ID NO: 6948 - protein, 376 aa, Cyanothece
MNHVHVNDTTLRDGEQAAGIVFSAIEKIAIACLMDAIGIPELEVGIPAMGGSEAESHHRHCPKRLKTALLGLEPCGSSDIEASIACGLRRVHISVPVSDIQIKAKFKGKTNLVWDRLRDSINFALDHDLFVSVGAEDASRADESFLVEVAQFAESLGASRFRFCDTVGILNPLTTAQKVGKLVKSIKMPIEMHTHNDFGLATANALAGLQAGAVSVNTTVNGLGERAGNAALEEMIMALKRLYQVDLGMESSRLRELSQLVVKASGIPLPPWKAIVGTMFAHESGIHAHGVLQNPQTYEPFSPDEVGWKRRLVVGKHSGRHLLTNLLSQHGISLNHEESQVVLDSVRHLSVQMKRSLTVEELIDVVTNRSMSHGIV

SEQ ID NO: 6949 - DNA, 1134 bp, Gloeothece sp
  CDS (1)..(1134): transl_table=11
atgaatcatatccatattaatgatacgaccctacgggatggagaacaagcggctggcattgtttttagtgctgctgaaaaaattgcgatcgccgttcttctggatgcgatcggcactcctgaattagaagtcggtatcccagcaatggggggcaatgaagcagaagccattaccaccattgcacgtttgggactcaatacggctttattgggttggaaccgagcaatacggtctgatatcgaggcttctattgcttgtggcttgaaacgggttcatgtctctgttcctgtctccgatatccaaattaaagctaagttccagggtaactcccagttagtctttcaaagattggaagaaagtctcaagtttgctttagatcatggcttatttgtgtctgttggagctgaagactcttcccgagctgataccgcttttttaagtgaagtagctcagtttgctcaggacttaggtgcttcccgtttccgtttctgtgaaacggtgggcattcttgaccccctcaccacagcccaaaaggtgggaaaattggtgaagtccctcaagattcctgtggaaatgcacacccataacgattttgaactatcaactgccaatgccttagccggaattaaggcaggggcccaatcagtcgataccaccgtgaatgggttgggagaacgggccgggaatgcggccttagaggagatgatcatggctctcaaacaactctatcaggttgatttaggctttgatacctctcgtctacgggaactctcccaattggtgatccaagcttctggtgtatctcttcccccttggaaagcgatcgttggggagaatatctttgcccacgaatcgggaattcatgcccatggggtcttacaaaatccccaaacctatgaacccttttcccccgatgaagtgggttgggaacgtcgtttagtcgttggcaaacattcgggacgacatttattgctcaatttattgagtcaacatgggattcgtctagaccatgaagaatctcaagtggtgttagaggcagtgcgtcatttatcggttcagatgaagcgaagtctaaccgttgaagaattgcttgatttagtacccaataggaggatgtctcatgggattgtataa

SEQ ID NO: 6950 - protein, 377 aa, Gloeothece sp
MNHIHINDTTLRDGEQAAGIVFSAAEKIAIAVLLDAIGTPELEVGIPAMGGNEAEAITTIARLGLNTALLGWNRAIRSDIEASIACGLKRVHVSVPVSDIQIKAKFQGNSQLVFQRLEESLKFALDHGLFVSVGAEDSSRADTAFLSEVAQFAQDLGASRFRFCETVGILDPLTTAQKVGKLVKSLKIPVEMHTHNDFELSTANALAGIKAGAQSVDTTVNGLGERAGNAALEEMIMALKQLYQVDLGFDTSRLRELSQLVIQASGVSLPPWKAIVGENIFAHESGIHAHGVLQNPQTYEPFSPDEVGWERRLVVGKHSGRHLLLNLLSQHGIRLDHEESQVVLEAVRHLSVQMKRSLTVEELLDLVPNRRMSHGIV

SEQ ID NO: 6951 - DNA, 1761 bp, Ostreococcus tauri
  CDS (1)..(1761)
atgcggtgcgagcggttcgtcgcggtggcgtccgtggggtcggagagcgcggtgacgcgagcgccgagaccggcgtacgttccgggggttatctcggacccgaagtacgtgcgcgtgttcgacacgacgctgcgcgacggtgaacagagcccgggagcgacgctgacgagtcgcgagaagctggatatcgcgacgtcgctggcgaagctcggtgtggacgtcatcgaggccgggtttccgatcgcgagtccggacgatctggaggcggtgcgaggcatcgcgaaaaaggttggcaacgaggtgtacgaggatggatacgtgccggttatttgcgggttatcgcgagcgaataagaaggatatcgacgcggcgtgggagggcgttcgtcacgcgctgcgaccgcgcattcacaccttcatcgcgacgagccagatccacatggactacaagctgcgcaaaaccccagatgaggtggtgcaaatcgccgtggacgccgtcaagtacgctcgatcgctcgggtgcgaggacgtggagttctcgccggaagatgcgggtagatccgatcctcagttcttgtaccgcatcctgaacgccgtggtcgaggcgggggcgacgacgttgaacattccggacacggtcgggatttgtttgccggatgagtttgggacgctcatcaagggcattaaggagaacgtgaagggtgcgggggagactgtggtcatctctacacactgtcaaaatgatttaggtctttccacggcgaactctttggcgggcgtcgccaacggtgcgcgccaggttgagtgcaccatcaacggcatcggagagcgtgcgggtaacgcgtcgttggaagaagtcactatggccatcttcatgcgtggacaagagcgattgatgggtgcctatacgggtatcaatccggtgtacatctacccgtcgtctcagatggtgaagaatttcagtggtatggccattcagccgcacaaggcgattgttggcgcgaatgcattcgctcacgaatccggcatccaccaagacggtatgctcaagaataagctcacgtacgaaattatcgctccggagcaaatcggttatttccgaggcgaggacgagtgcggcgtagtgatgggtaagcactccggccgccacgccttgtcttccaagttgaagcaactcggcgtgccgatggagggtgcggcgctcgatgaagtcttcaaccgcttcaagctcgtcgcagagacgaaactcggtggggtgaacgacgacgaattgttggcaatcgtgcgtgacggtgaatccgtccaagatccggcgtggtctttggaaaccgttcaagtcgtgtgcggcaccaccggtttgcccacggcgacggtgaggatgaacaacagagatggcactcaacacatctccgccgtggtcggcaccggtccggtcgacgccgcgttcaaggccatcgatgcgctggttggtttggacgtcgtactcaccgagtaccgagtcaccgcggtgactaagggtattaactcgatggcggagactaccatcaccatcaagccaaaggagggcgtggaacaaaagctcggcacggatgtctacaaaaccaacgtccaaacgggcgagaagaccatgcgcgcgttcacggctaccggtgcagacacggatatcgtcgtctcgtctgcgcgtgcctacgtcatcgcgctcaaccgtatggttgagtacgtcgccaaggcgtacgtacacgccgaacccgtcagccgatga

SEQ ID NO: 6952 - protein, 586 aa, Ostreococcus tauri
MRCERFVAVASVGSESAVTRAPRPAYVPGVISDPKYVRVFDTTLRDGEQSPGATLTSREKLDIATSLAKLGVDVIEAGFPIASPDDLEAVRGIAKKVGNEVYEDGYVPVICGLSRANKKDIDAAWEGVRHALRPRIHTFIATSQIHMDYKLRKTPDEVVQIAVDAVKYARSLGCEDVEFSPEDAGRSDPQFLYRILNAVVEAGATTLNIPDTVGICLPDEFGTLIKGIKENVKGAGETVVISTHCQNDLGLSTANSLAGVANGARQVECTINGIGERAGNASLEEVTMAIFMRGQERLMGAYTGINPVYIYPSSQMVKNFSGMAIQPHKAIVGANAFAHESGIHQDGMLKNKLTYEIIAPEQIGYFRGEDECGVVMGKHSGRHALSSKLKQLGVPMEGAALDEVFNRFKLVAETKLGGVNDDELLAIVRDGESVQDPAWSLETVQVVCGTTGLPTATVRMNNRDGTQHISAVVGTGPVDAAFKAIDALVGLDVVLTEYRVTAVTKGINSMAETTITIKPKEGVEQKLGTDVYKTNVQTGEKTMRAFTATGADTDIVVSSARAYVIALNRMVEYVAKAYVHAEPVSR

SEQ ID NO: 6953 - DNA, 1524 bp, Arabidopsis lyrata subsp
  CDS (1)..(1524)
atggcttcatcacttctgacatcttccggtatgatccataccaccggttccaccgtggttggccggtcattgttaccctttcaatcttccctgcactctctcagcctcacccattcatacaagaagccggcatatttcatctcatgttgctcttctgtgtccaaaaatggggcaactaatgctactgatctcaaacccgttgtggatcggtggccggagtacataccaaacaagctccccgacaagaactatgtgcgtgtattcgacacaacgctccgagacggtgaacaagctcccggtggatcccttactccgccgcagaagctagagattgccaggcagcttgctaaactccgagtagacatcatggaagttggttttccgggatcatctgaagaagagttagaaaccgttaagaccatcgccaagaccgtgggaaatgaggtggatgaggaaacaggttacgtccccgtgatatgcgccatcgcacgaagcaaacatagagacattgaggcggcttgggaagcggtaaagtacgcgaagaggccaaggatactcatattcacatctactagtgacattcacatgaaatataagttgaaaaagactaaagaagaagtgattgagatggccgtgagtagtatcaggctcgctaaaagcttgggcttcaatgacatccaactcgggtgcgaagatggcggcaggtcggacaaggagttcctatgcaagattctaggagaagcaataaaagcgggtgttacggtggtgaacgtcgcagacacggtagggatcaacatgccacatgaatatggagaactcgtaacctatctcaaagcaaacactcctggaattgatgatatcgtcttcagtgttcattgtcacaacgaccttggtcttgctaccgccaactcaatcgccggtatacgtgcgggagcaagacaagtggaagtaacgatcaacggaatcggtgaaagaagtgggaatgcgtcccttgaagaggtcgtgatggctttgaaatgtcgaggagcatatgtgatcaatggtgtttacacaagaatagacacacgccaaattatggctacaagcaagatggttcaagagtacaccggcttgtatgttcaaccacataagcccatagttggaaccaactgttttgttcatgagagcggcattcaccaggatggaatattgaaaaatcggagtacatatgagatcttatcaccagaagatattggggtcgtaaaatctcaaaactccggccttgttcttggaaagcttagtggacgtcatgctgtgaaagatcggctgaacgagttgggatatgaactcgatgatgagaaactgaacgatgtcttctcacggttcagagatttaaccaagcataaaaagaggatcacggatgctgatatgaaggcgttagtaacatccagcgatgaaatctctttagagaaattaaacagcgctaacggtttaaagtctaacggctatgtaccagttcctcaggtttcatcaaatatgctataa

SEQ ID NO: 6954 - protein, 507 aa, Arabidopsis lyrata subsp
MASSLLTSSGMIHTTGSTVVGRSLLPFQSSLHSLSLTHSYKKPAYFISCCSSVSKNGATNATDLKPVVDRWPEYIPNKLPDKNYVRVFDTTLRDGEQAPGGSLTPPQKLEIARQLAKLRVDIMEVGFPGSSEEELETVKTIAKTVGNEVDEETGYVPVICAIARSKHRDIEAAWEAVKYAKRPRILIFTSTSDIHMKYKLKKTKEEVIEMAVSSIRLAKSLGFNDIQLGCEDGGRSDKEFLCKILGEAIKAGVTVVNVADTVGINMPHEYGELVTYLKANTPGIDDIVFSVHCHNDLGLATANSIAGIRAGARQVEVTINGIGERSGNASLEEVVMALKCRGAYVINGVYTRIDTRQIMATSKMVQEYTGLYVQPHKPIVGTNCFVHESGIHQDGILKNRSTYEILSPEDIGVVKSQNSGLVLGKLSGRHAVKDRLNELGYELDDEKLNDVFSRFRDLTKHKKRITDADMKALVTSSDEISLEKLNSANGLKSNGYVPVPQVSSNML

SEQ ID NO: 6955 - DNA, 1446 bp, Boechera divaricarpa
  CDS (1)..(1446)
atggcctcggtacttctcacatcttccggtatgatcactaccactggtcccaccgtcgttgtccggtcagtgttacccattaaatcttctctgccctctatccacctgacccgtccgtgcaacaaaccgactttgttcatctcatgttgctcatcggagtccaaaaaggctgcaactagtgctactgacctcaaacccatcgtggaacggtggccggagtacataccgaacaagctccccgacaagaactatgtacgtgtactcgacaccacccttcgtgaaggcgaacaagctccaggtggatcccttactccaccacagaagctagagattgcccggcaactcgctaaactccgagtggacatcatggaagtcggttttccggggtcatctgaagaagagtttgagaccgttaaagtcatcgccaagaccgtggggaatgaggtggatgtggaaacaggttatgtcccggtgatatccacccttgcacgaagcaaaaatagagacatcgaggccgcttggaaggcggtgaagtacgccaagaggccgaggatatgcatattcacatctacgagtgacattcacatgaaatataagttgaaaaagactcaagaagaagtgatcgagatgtccttgagtggtattaggttcgccaaaagcttaggcttccatgacatccaatttggttgcgaagacggctgcaggtcggagaaggactttgtctgtaagattctaggagaagcgataaaagcgggtgctacctcggtgtgcatcgcggacacggtagggatcaccatgccccaagaattcggagaactcgtgacctatgtgaaagcaaacactcctggaattaatgatgttgtcttcagcgttcattgtcacaacgacctcggtcttgctaccgccaacacaatcgccgctgtatgtgccggagtaagacaattcgaagtaacgatcaacggaataggtgaaagaagtgggaatgcgccgcttgaagaggtcgtgatggctttgaaatgtcgaggagaatatctgatggatggtgtttacacaagaatagacacacgccaaattatggctactagcaagatggttcaagagtataccggcttgtatgttcaaccacataagcctatagtcggagacaactgttttgttcatgagagcggcattcaccaggatggaatattgaaaaatcgaagtacatatgagatcttatcaccagaagatgttgggatcgtaaaatctcaaaattctggcattgttcttggaaagcttagtggacgtcatgctgtaaaagaacggctgaaagagttgggatacgaaatcaatgatgagaaattgaaagatatcttctcacaattcagagatttaaccaaacagaaaaagaggatcgcggatgctgatctaaaagcattagttgtgaacggtgttgagagaaattaa

SEQ ID NO: 6956 - protein, 481 aa, Boechera divaricarpa
MASVLLTSSGMITTTGPTVVVRSVLPIKSSLPSIHLTRPCNKPTLFISCCSSESKKAATSATDLKPIVERWPEYIPNKLPDKNYVRVLDTTLREGEQAPGGSLTPPQKLEIARQLAKLRVDIMEVGFPGSSEEEFETVKVIAKTVGNEVDVETGYVPVISTLARSKNRDIEAAWKAVKYAKRPRICIFTSTSDIHMKYKLKKTQEEVIEMSLSGIRFAKSLGFHDIQFGCEDGCRSEKDFVCKILGEAIKAGATSVCIADTVGITMPQEFGELVTYVKANTPGINDVVFSVHCHNDLGLATANTIAAVCAGVRQFEVTINGIGERSGNAPLEEVVMALKCRGEYLMDGVYTRIDTRQIMATSKMVQEYTGLYVQPHKPIVGDNCFVHESGIHQDGILKNRSTYEILSPEDVGIVKSQNSGIVLGKLSGRHAVKERLKELGYEINDEKLKDIFSQFRDLTKQKKRIADADLKALVVNGVERN

SEQ ID NO: 6957 - DNA, 1512 bp, Boechera divaricarpa
  CDS (1)..(1512)
atggcttcgttacttcacacatcttccagtatgatcaccaccatcagtcccaccatggttgcccggtcagtgttacccattggatcttctctgccctctatccgcctgacccgtccgttcaacaagccgactttgttcatctcatgtagctcctctgagtccaaaaaagcggcaactagtggtactgacctcaaacccatcgtggaacggtggcctgagtacataccgaacaagctcccccacaagaactatgtgcgtatattagacacgacactccgtgacggtgaacaatctcccggtgcagctcttactccaccgcagaagctagagattgcccgccagctcgctaaactccgagtagacatcatggaagtcggttttccggtgtcgtctgaggaagagttcgaagccattaaaaccatagctaagaccgtggggaacgaggtggatgaggaaaccggttacgtcccggtgatatgcgccattgcacgatgcaaacaaagtgacatcgaggcggtttgggaggcgctgaagtacgcgaagaagcagagggtaataatattcacatctactagtgacattcacatgaaatataagttgaaaaagactcaagaagaagtgatcgagatggccgtgagtagtattaagtacgctaaaagcttgggcttcactgacatccaacttgggtgcgaagatggcggcaggtcggagaaggagtttctatgtaagattctaggagaatcgattaaagcgggggcaaccacggtgggcttcgcggacacggtcgggatcaacatgccccaagaattcggagaactcatggcttatgtcaaagaaaacactcctgggtttaatgatattgtcttcgccattcattgtcacaacgaccttggtgttgctactgccaacacaatcgccggtatatgtgcgggcgcaagacaagtcgaagtaacgatcaacggaataggtgaaagaagtgggaatgcgccgcttgaagaggtcgtgatggctttgaaatgtcgaggagaatatctgatggatggtgtttacacaaaaatagatacacgccaaattatggcgactagcaagatggttcaagagcataccggcatgtatgttcaaccacataagcccatagttggagacaactgttttgttcatgagagcggcattcaccaggatggaatattgaaaaatcggagtacatatgagatcttatcaccagaagatgttgggatcgtaaaatctcaaaattctggcattgttcttggaaagcttagtggacgtcatgctgtaaaagaacggctgaaagagttgggatatgaaatcaatgatgagaactttaacgacatcttctcacgattcagagatttaaccaagcataaaaagagaatcaccgatgctgatctgaaggcattagtggtgagcggtgatgaaatctcattagagaaattaaacagtaaaggaattaacaaacttatgtcaagccctcagattccctctgtggtataa

SEQ ID NO: 6958 - protein, 503 aa, Boechera divaricarpa
MASLLHTSSSMITTISPTMVARSVLPIGSSLPSIRLTRPFNKPTLFISCSSSESKKAATSGTDLKPIVERWPEYIPNKLPHKNYVRILDTTLRDGEQSPGAALTPPQKLEIARQLAKLRVDIMEVGFPVSSEEEFEAIKTIAKTVGNEVDEETGYVPVICAIARCKQSDIEAVWEALKYAKKQRVIIFTSTSDIHMKYKLKKTQEEVIEMAVSSIKYAKSLGFTDIQLGCEDGGRSEKEFLCKILGESIKAGATTVGFADTVGINMPQEFGELMAYVKENTPGFNDIVFAIHCHNDLGVATANTIAGICAGARQVEVTINGIGERSGNAPLEEVVMALKCRGEYLMDGVYTKIDTRQIMATSKMVQEHTGMYVQPHKPIVGDNCFVHESGIHQDGILKNRSTYEILSPEDVGIVKSQNSGIVLGKLSGRHAVKERLKELGYEINDENFNDIFSRFRDLTKHKKRITDADLKALVVSGDEISLEKLNSKGINKLMSSPQIPSVV

SEQ ID NO: 6959 - DNA, 1515 bp, Boechera divaricarpa
  CDS (1)..(1515)
atggcttcgtcacttctgacatcttcgggtataagccctaccaccggttctaccgtggttgtcgggtccgtgttaccctttcgcacttctatgctctctctccgcctgacccgaccgtacaagaagccggccttgttcatctcatgttgctcctctgagtccagaaagactgcaactaatgctactgacctcaaacccgttgtggaacggtggccagagtacataccgaacaagctcccggacaagaactatgtgcgtgtattcgacacgacgctccgtgacggtgaacaagctcccggtggatcccttactccgccacagaagctagagattgccaggcagctcgctaaactccgagtagacatcatggaagtcggttttccggggtcgtctgaagaagagttagaaaccgttaaaaccatcgccaagactgtgggaaatgaggtggatgaggaaacaggctacgtcccggcgatatgcgccattgcacgaagcaaacatagcgatattgaggccgcttgggaggcagtgaagtatgcgaagaggccgaggatactcattttcacatctactagtgacattcacatgaaatataagttgaagaaaactaaagaagaagtgatcgagatggctgcgagtagtgttaggttcgctaaaagcttgggctttaatgacattcaatttggttgcgaagatggcggcaggtcggacaaggagtttctatgcaagattctaggagaatcgatcaaagcgggtgctacggtggtgaacgtcgcagatactgttgggatcaacatgccacatgaatacggagaactcgtgacctatgtcaaagcaaacacgcctggaattgatgatattgtcttcagtgttcattgtcacaacgaccttggtcttgctaccgccaactcaatcgccggtatacgtgcgggagcaagacaagtcgaagtaacgataaacggaattggtgaaagaagtgggaatgcgtcgcttgaagaggtcgtgatggctttgaaatgtcgaggagcatatgtactggatggtgtttacacaggaatagacacccgggaaattatggctacaagcaagatggttcaagagtataccggcttgtatgttcaaccacataaacccatagttggagccaactgttttgttcatgagagcggcattcaccaggatggaatattgaaaaatcggagtacgtatgagatcttatcaccagaagatgttggggtcgttaaatctcaaaattccggcattgttcttggaaagcttagtggacgtcatgctatgaaaggtcggctgaaagagttgggatatgaactcgatgatgagaaattgaacgacgtcttctcacgattcagggatttaaccaagcataaaaagagaatcacggatgctgatctgaaggcattagtaacatctagtgatgaaatttctttcgagaaattaaaccgcgctaatggtaaaatgtccaacggctatataccagttcctcaggtttccctctaa

SEQ ID NO: 6960 - protein, 504 aa, Boechera divaricarpa
MASSLLTSSGISPTTGSTVVVGSVLPFRTSMLSLRLTRPYKKPALFISCCSSESRKTATNATDLKPVVERWPEYIPNKLPDKNYVRVFDTTLRDGEQAPGGSLTPPQKLEIARQLAKLRVDIMEVGFPGSSEEELETVKTIAKTVGNEVDEETGYVPAICAIARSKHSDIEAAWEAVKYAKRPRILIFTSTSDIHMKYKLKKTKEEVIEMAASSVRFAKSLGFNDIQFGCEDGGRSDKEFLCKILGESIKAGATVVNVADTVGINMPHEYGELVTYVKANTPGIDDIVFSVHCHNDLGLATANSIAGIRAGARQVEVTINGIGERSGNASLEEVVMALKCRGAYVLDGVYTGIDTREIMATSKMVQEYTGLYVQPHKPIVGANCFVHESGIHQDGILKNRSTYEILSPEDVGVVKSQNSGIVLGKLSGRHAMKGRLKELGYELDDEKLNDVFSRFRDLTKHKKRITDADLKALVTSSDEISFEKLNRANGKMSNGYIPVPQVSL

SEQ ID NO: 6961 - DNA, 1509 bp, Arabidopsis cebennensis
  CDS (1)..(1509)
atggcttcgtttcttctcacatcttccagtatgataaccaccacatgtccctccatggttctccggtcagggttacccattggatcttcccttccctctcttcgcctgacccgtccatacaacaaggcgactttgttcaccgcatgttactcttctgagtccaaaaaggtggcaagtagtgctgatctcaaacctgccgttgaacggaggccggagtacataccgaacaagcttcctcacaagaactatgttcgtgtattagacacgacgctccgtgacggtgaacaatctcccggtgcagcacttactccaccgcagaagctagagattgcccggcagctcgctaaactccgagttgacatcatggaagttggttttccggtgtcgtctgaggaagagttcgaagccattaaaaccatcgccaagaccgtggggaacgaggtggatgaggaaacaggttacgtccctgtgatatgcggcattgcccgatgcaaaaatagagacattgaggcggcttgggaggcactgaagtatgcgaagaggccgagggtaatactattcacatctactagtgacattcacatgaaatataagttgaaaaagactaaagaagaagtgatcgagatggccgtgaacagtgttaagtacgctaaaagcttgggcttcaaagacatcgaatttgggtgcgaagatggcggcaggacggagaaggattttctatgtaagattctaggagaatcgataaaagcgggtgcaaccacggtgggctttgcggacacggtcgggatcaacatgccgccagaattcggagaactcgtggcctatgtcaaagaaaacactcctggagctgatgatattgtcttcaccattcattgccacaacgaccttggtgttgctaccgccaacacaatatccggtatatgtgcgggagcaagacaagtagaagtaacgatcaacggaattggtgaaagaagtgggaatgcgccgcttgaagaggtcgtgatggctttgaaatgtcgaggagaatatcttatggatggtgtttacacaaaaatagacacacgccaaattatggctacaagcaagatggttcaagagcataccggcatgtatgttcaaccacataagccaatagttggagacaactgttttgttcatgagagcggcatacaccaggatggaatattgaaaaatcgaagtacatatgagattttatcaccagaagatgttgggatcgtaaaatctgaaaattctggcattatttttggaaagcttagtggacgtcatgctgtaaaagaccggcttaaagagttgggatatgaaatcagtgatgagaaattcaacgacatcttctcacgatacagagaattaaccaaggagaaaaagagaatcacggacgatgatctgaaagcattagtggtgaacggtgatgaaatctcatcagataaattaaacagtaaaggaattaacaaccttacgtcaagccctcagatttccgctgttgtataa

SEQ ID NO: 6962 - protein, 502 aa, Arabidopsis cebennensis
MASFLLTSSSMITTTCPSMVLRSGLPIGSSLPSLRLTRPYNKATLFTACYSSESKKVASSADLKPAVERRPEYIPNKLPHKNYVRVLDTTLRDGEQSPGAALTPPQKLEIARQLAKLRVDIMEVGFPVSSEEEFEAIKTIAKTVGNEVDEETGYVPVICGIARCKNRDIEAAWEALKYAKRPRVILFTSTSDIHMKYKLKKTKEEVIEMAVNSVKYAKSLGFKDIEFGCEDGGRTEKDFLCKILGESIKAGATTVGFADTVGINMPPEFGELVAYVKENTPGADDIVFTIHCHNDLGVATANTISGICAGARQVEVTINGIGERSGNAPLEEVVMALKCRGEYLMDGVYTKIDTRQIMATSKMVQEHTGMYVQPHKPIVGDNCFVHESGIHQDGILKNRSTYEILSPEDVGIVKSENSGIIFGKLSGRHAVKDRLKELGYEISDEKFNDIFSRYRELTKEKKRITDDDLKALVVNGDEISSDKLNSKGINNLTSSPQISAVV

SEQ ID NO: 6963 - DNA, 1524 bp, Arabidopsis cebennensis
  CDS (1)..(1524)
atggcttcatcacttctgacatcttccggtatgatccataccaccggttccaccgtggttggccggtcagtgttaccctttcaatcttccctgcactctcttcccctcacccatctatacaagaagccggcatatttcatctcatgttgctcttctgtgtccaaaattggggcaactaatgctactgatctcaaacccgttgtggaacggtggccggagtacataccaaacaagctccccgacaacaactatgtgcgtgtattcgacacaacgctccgtgacggtgaacaagctccaggtggatcccttactccgccgcagaagctagagattgcccggcagcttgctaaactccgagtagacatcatggaagtcggttttccgggatcatctgaagaagagttagaaaccgttaagaccatcgccaagaccgtggggaatgaggtggatgaggacacaggttacgtccccgtaatatgtgccatcgcacgaagcaaacatagagacattgaggcggcttgggaagcggtaaagtatgcgaagaggccaaggatactcatattcacatctactagtgacattcacatgaaatataagttgaaaaagactaaagaagaagtgattgagatggccgtgagtagtattaggctcgctaaaagcttgggcttcaatgacatccaacttgggtgcgaagatgccggcaggtcggacaaggagttcctatgcaagattctaggagaagcaataaaagcgggtgttatggtggtgaacgtcgcagacacggtagggatcaacatgccacatgaatatggagaactcgtaacctatctaaaagcaaacactcctggaattgatgatatcgttttcagtgttcattgtcacaacgatcttggtcttgctaccgccaactcaatcgccggtatacgtgcgggagcaagacaagtggaagtaacgatcaacggaattggtgaaagaagtgggaatgcgtcgcttgaagaggtcgtgatggctttgaaatgtcgaggagcatatgtgattaatggtgtttacacaagaatagacacacgccaaattatggctaccagcaagatggttcaagagtacaccggcttgtatgttcaaccacataagcccatagttggagccaactgttttgttcatgagagcggcattcaccaggatggaatattgaaaaatcggagtacatatgagatcttatcaccagatgatattgggatcgtcaaatctcaaaactccggccttgttcttggaaagcttagtggacggcatgctgtgaaagatcggctgaacgagttgggatatgaacttgatgatgaaaaactgaacgacgtcttctcacggttcagagatttaaccaagcataaaaagaggatcacggatgctgatatgaaggcattagtaacatctagcgatgaaatctctttagagaaattaaacggcgctaacagtataaagtctaacgtctatgtaccagttcctcaggtttcatcaaatatgctataa

SEQ ID NO: 6964 - protein, 507 aa, Arabidopsis cebennensis
MASSLLTSSGMIHTTGSTVVGRSVLPFQSSLHSLPLTHLYKKPAYFISCCSSVSKIGATNATDLKPVVERWPEYIPNKLPDNNYVRVFDTTLRDGEQAPGGSLTPPQKLEIARQLAKLRVDIMEVGFPGSSEEELETVKTIAKTVGNEVDEDTGYVPVICAIARSKHRDIEAAWEAVKYAKRPRILIFTSTSDIHMKYKLKKTKEEVIEMAVSSIRLAKSLGFNDIQLGCEDAGRSDKEFLCKILGEAIKAGVMVVNVADTVGINMPHEYGELVTYLKANTPGIDDIVFSVHCHNDLGLATANSIAGIRAGARQVEVTINGIGERSGNASLEEVVMALKCRGAYVINGVYTRIDTRQIMATSKMVQEYTGLYVQPHKPIVGANCFVHESGIHQDGILKNRSTYEILSPDDIGIVKSQNSGLVLGKLSGRHAVKDRLNELGYELDDEKLNDVFSRFRDLTKHKKRITDADMKALVTSSDEISLEKLNGANSIKSNVYVPVPQVSSNML

SEQ ID NO: 6965 - DNA, 1524 bp, Arabidopsis lyrata subsp
  CDS (1)..(1524)
atggcttcatcacttctgacatcttccggtatgatccataccaccggttccaccgtggttggccggtcattgttaccctttcaatcttccctgcactctctcagcctcacccattcatacaagaagccggcatatttcatctcatattgctcttctgtgtccaaaaatggggcaactaatgctactgatctcaaacccgtggtggaacggtggccagagtacataccaaacaagctccccgacaagaactatgtgcgtgtattcgacacaacgctccgcgacggtgaacaagctcccggtggatcccttactccgccgcagaagctagagattgcccggcagcttgctaaactccgagtagacatcatggaagttggttttccgggatcatctgaagaagagttagaaaccgttaagaccatcgccaagaccgtggggaatgaggtggatgaggaaacaggttacgtccccgtgatatgcgccatcgcacgaagcaaacaaagagacattgaggcggcttgggaggcggtaaagtacgcgaagaggccaaggatactcatattcacatctaccagtgacattcacatgaaatataagttgaaaaagactaaagaagaagtgattgagatggccgtgagtagtatcaggctcgctaaaagcttgggcttcaatgacatccaactcgggtgcgaagatggcggcaggtcggacaaggagttcctatgcaagattctaggagaagcaataaaagcgggtgttacggtggtgaacgtcgcagacacggtagggatcaacatgccacatgaatatggagaactcgtaacctatctcaaagcaaacactcctggaattgatgatatcgtcttcagtgttcattgtcacaacgaccttggtcttgctaccgccaactcaatcgccggtatacgtgcgggagcaagacaagtggaagtaacgatcaacggaatcggtgaaagaagtgggaatgcgtcccttgaagaggtcgtgatggctttgaaatgtcgaggagcatatgtgatcaatggtgtttacacgagaatagacacacgccaaattatggctacaagcaagatggttcaagagtacaccggcttgtatgttcaaccacataagcccatagttggagccaactgttttgttcatgagagcggcattcaccaggatggaatattgaaaaatcggagcacatatgagatcttatcaccagaagatattggggtcgtaaaatctcaaaactccggccttgttcttggaaagcttagtggacgtcatgctgtgaaagatcggctgaacgagttgggatatgaactcgatgatgagaaactgaacgatgtcttctcacggttcagagatttaaccaagcataaaaagaggatcacggatgctgatatgaaggcgttagtaacatccagcgatgaaatctctttagagaaattaaacagcgctaacggtttaaagtctaacggctatgtaccagttcctcaggtttcatcaaatatgctataa

SEQ ID NO: 6966 - protein, 507 aa, Arabidopsis lyrata subsp
MASSLLTSSGMIHTTGSTVVGRSLLPFQSSLHSLSLTHSYKKPAYFISYCSSVSKNGATNATDLKPVVERWPEYIPNKLPDKNYVRVFDTTLRDGEQAPGGSLTPPQKLEIARQLAKLRVDIMEVGFPGSSEEELETVKTIAKTVGNEVDEETGYVPVICAIARSKQRDIEAAWEAVKYAKRPRILIFTSTSDIHMKYKLKKTKEEVIEMAVSSIRLAKSLGFNDIQLGCEDGGRSDKEFLCKILGEAIKAGVTVVNVADTVGINMPHEYGELVTYLKANTPGIDDIVFSVHCHNDLGLATANSIAGIRAGARQVEVTINGIGERSGNASLEEVVMALKCRGAYVINGVYTRIDTRQIMATSKMVQEYTGLYVQPHKPIVGANCFVHESGIHQDGILKNRSTYEILSPEDIGVVKSQNSGLVLGKLSGRHAVKDRLNELGYELDDEKLNDVFSRFRDLTKHKKRITDADMKALVTSSDEISLEKLNSANGLKSNGYVPVPQVSSNML

SEQ ID NO: 6967 - DNA, 1311 bp, Aspergillus oryzae
  CDS (1)..(1311)
atgccgagcgccagtgagacaagtacagatctgacgagccgcaatccctacggccacggcaatggggttagcgattttttgagcaatgtctcgcggttcaagattatcgagagtaccctgcgtgagggcgagcaatttgccaatgccttcttcgacacgcagaagaagatcgagattgccagggcactagatgagtttggggttgattacattgagctcacaaacccgtgcgcctcagagcagtcgaggcttgactgcgaggccatctgcaagctaggccttaaggctaagattctgacccatattcggtgccatatggacgatgcgcgcatcgcggtggccaccggcgttgatggcgtcgatgtaatgatcggaacatcgtctcttatgcgccagcactcccatggcaaggacattgagtatatcaagaagaccgccattgaagtaatcaacttcgtcaagtcgcaaggcattgaagtccgcttttcaacagaagactccttccgctcggacctggtggacctcctctcaatctactctgccgttgaccaagtcggcgtgaaccgagtcggtgttgccgatacaatcggctgtgcctccccacgacaggtgtatgagctcatccgcgtccttcgcggtgtagtcagctgcgatatagagacccatttccacgacgacgcgggatgtgcaatcgcaaatgcatattgcgctctggaagcaggtgcaacacatatcgacacttcggtactggggatcggtgagcggaatggtatcaccccgcttggagggctgatggcgcgcatggttgccacgcatccagagtatgtgaagtcaaagtaccgcctcgataagattaaagatatcgaggatcttgttgccgaggctgtggagattaatatcccgttcaacaactatatcacgggcttttgcgcgttcacgcacaaggctggtatccatgccaaagccatcctcaacgacccaagtacctacgaaatcatcaaccccgcagattttggcatgacccgctatgtgcattttgcctcgcggctgaccggttggaacgccatccgatcccgggcgcagcaactaaacatcagcatgaccgacaagcaatacaaggagtgcacggccaagatcaaggctctagcagatatccgcccgattgcgatcgatgatgccgacagtatcatccgggcgtactatcgcaatattcaatcgggcgaggacaatccgttgatggagctcactgcagacgaggcagcgcagcttgcggcgaaggagaaggagctcggggaggtggtgactgcgtga

SEQ ID NO: 6968 - protein, 436 aa, Aspergillus oryzae
MPSASETSTDLTSRNPYGHGNGVSDFLSNVSRFKIIESTLREGEQFANAFFDTQKKIEIARALDEFGVDYIELTNPCASEQSRLDCEAICKLGLKAKILTHIRCHMDDARIAVATGVDGVDVMIGTSSLMRQHSHGKDIEYIKKTAIEVINFVKSQGIEVRFSTEDSFRSDLVDLLSIYSAVDQVGVNRVGVADTIGCASPRQVYELIRVLRGVVSCDIETHFHDDAGCAIANAYCALEAGATHIDTSVLGIGERNGITPLGGLMARMVATHPEYVKSKYRLDKIKDIEDLVAEAVEINIPFNNYITGFCAFTHKAGIHAKAILNDPSTYEIINPADFGMTRYVHFASRLTGWNAIRSRAQQLNISMTDKQYKECTAKIKALADIRPIAIDDADSIIRAYYRNIQSGEDNPLMELTADEAAQLAAKEKELGEVVTA

SEQ ID NO: 6969 - DNA, 1326 bp, Aspergillus oryzae
  CDS (1)..(1326)
atgggcacgcggcccctgccaatggcaatgaaccctcacccctccgcctcccggaacccctatggccacaacgttggtgtgaccgactttctgagcaacgtctcccggttcaagatcattgagagtaccctccgtgagggtgaacagttcgccaatgctttctttgataccgaaaagaagattgaaatcgctaaggctctggatgatttcggtgtcgactacatcgaacttaccagtccttgtgcctctgagcagtcgagacttgactgcgaggctatctgcaagctcggcttgaaggccaagattcttactcacattcgatgccacatggatgatgcccgtgttgccgtcgagactggtgttgatggagttgacgtcgtcatcggcacttcgtcctacctccgtgagcactctcacggcaaggatatgacctacatcaagaacactgctattgaagttattgaatatgtcaagtccaagggcatcgagattcgattctctagtgaggactccttccgttctgacctcgtcgacctcttgtccatctactccgctgttgacaaggttggtgtgaaccgtgttggtattgccgatactgtcggctgcgcttctcctcgccaagtttacgagcttgttcgtgtcctgaggggtgttgttggctgcgacattgagacccacttccacaacgacactggctgtgccattgccaacgcttactgtgccctggaggccggtgccactcacattgatacctccgttctcggtatcggtgagcgtaacggtatcacccctcttggtggtctcatggctcgtatgatggttgccgatcctgcctacgtcaagggcaagtacaagctggagaagctcaaggacattgaagatcttgtggccgaggctgttgaggtcaacattcctttcaacaactacatcaccggtttctgtgctttcacccacaaggctggtatccatgctaaggccatcctgaacaaccccagcacctacgagatcatcaaccctgccgactttggcatgaccagatacgttcacttcgcctctcgtctgactggctggaacgctatcaagtctcgtgctcagcagctcaagattgagatgactgacagccaatacaaggagtgcacggctaagatcaaggctcttgctgatatccgtcccatcgccgtcgacgatgccgacagtatcatccgtgcttactaccgtaacctcaagtcgggtgagaacaagcctctccttgatctgacggctgatgagcaggctcagttcgctgccaaggagaaggagcttgctgcttccggtgttgtggcttaa

SEQ ID NO: 6970 - protein, 441 aa, Aspergillus oryzae
MGTRPLPMAMNPHPSASRNPYGHNVGVTDFLSNVSRFKIIESTLREGEQFANAFFDTEKKIEIAKALDDFGVDYIELTSPCASEQSRLDCEAICKLGLKAKILTHIRCHMDDARVAVETGVDGVDVVIGTSSYLREHSHGKDMTYIKNTAIEVIEYVKSKGIEIRFSSEDSFRSDLVDLLSIYSAVDKVGVNRVGIADTVGCASPRQVYELVRVLRGVVGCDIETHFHNDTGCAIANAYCALEAGATHIDTSVLGIGERNGITPLGGLMARMMVADPAYVKGKYKLEKLKDIEDLVAEAVEVNIPFNNYITGFCAFTHKAGIHAKAILNNPSTYEIINPADFGMTRYVHFASRLTGWNAIKSRAQQLKIEMTDSQYKECTAKIKALADIRPIAVDDADSIIRAYYRNLKSGENKPLLDLTADEQAQFAAKEKELAASGVVA

SEQ ID NO: 6971 - DNA, 1128 bp, Heliobacterium chlorum
  CDS (1)..(1128): transl_table=11
atgggccaacgggtatggatgatggatacaactttgcgggacggggagcaatcccccggtgccgccttctcgccggaagaaaaagaatcaatcgcccgtgcgctggtggaagcgggagttcatgagatcgaggcgggggttccggccatgggcgaagacgaacaagcgaccatcgcccgcctcgtcgctttgaacctccctgttcgcttgaccacttggaaccgagcggtgatcgatgatctggaagcaagtttgaagactggggtccgagcggtagccatctccgttccctcttccgatcaacagattcggcggaagcttcaacaaagccgcgagtgggtccttgagacgttgggaaaatgcctgtaccgggccaagcaagaaggtctttatgtatgcattggcttggaagatgccagccgggccgatacagactttctcatccgcttaggcttagaagcccaacgtctcaaagccaaccgtctgcgtgtttccgatacgctcggtgtccttgaccccatccgaacctttacgctctttgaccgcttggccacatcgttaacgatccccttggaaattcacgcccacaatgatttaggcatggcgactgccaatacggttgcggcgatccaagccggtgcaaaagccgccagcgtcaccgtctgtggtcttggagaacgagccgggaacgcaccattggaagaagtagccgtggcgttgcggcaatgctgcaacgccgatactcatattcagatgacaaaactgcagagcctttgccaactggtaagccggatcacccgacgaccgattccgctggcgaaaccggtcgtcggccgctatgctttcacccatgcttccgccatccatgtcgatggcttacgcaaggataaaggaaactacgaaggcctgcctcccgagtatatcaaccgcaagcatcgcatcgccttaggcaaatacagcgggaaaaaatcactcgtacaggtcatacaaacgctcaatcttgagatggatccaacaatgttggatcacttgatccaaaaggttcgtctaaaaagccaaatcctcaaacgtcccctacgtcgccaagacatcttggaaatcgtcgcaaacgaacaaatcgtgaaatag

SEQ ID NO: 6972 - protein, 375 aa, Heliobacterium chlorum
MGQRVWMMDTTLRDGEQSPGAAFSPEEKESIARALVEAGVHEIEAGVPAMGEDEQATIARLVALNLPVRLTTWNRAVIDDLEASLKTGVRAVAISVPSSDQQIRRKLQQSREWVLETLGKCLYRAKQEGLYVCIGLEDASRADTDFLIRLGLEAQRLKANRLRVSDTLGVLDPIRTFTLFDRLATSLTIPLEIHAHNDLGMATANTVAAIQAGAKAASVTVCGLGERAGNAPLEEVAVALRQCCNADTHIQMTKLQSLCQLVSRITRRPIPLAKPVVGRYAFTHASAIHVDGLRKDKGNYEGLPPEYINRKHRIALGKYSGKKSLVQVIQTLNLEMDPTMLDHLIQKVRLKSQILKRPLRRQDILEIVANEQIVK

SEQ ID NO: 6973 - DNA, 1872 bp, Brassica oleracea
  CDS (1)..(1872)
atggcgtcttcgattctcagaaaccctatgctctcatcaccaacaacaatcaccaccccttctcttccctccttctcctcgaaaccctcacctctctcattccgcttcccaccctcccaccaccgctcctctctccgcatcaaatccctccgcctctcgtgctccctctcagatccctctcctcccctccgccgctgccgcccggagtacatccccaaccgcatttccgaccccaactacgtccgagtcttcgacaccactctccgcgacggcgaacagtcccccggagccaccctcacctccaaagagaagctcgacatcgcgcgccagctcgcgaagctgggcgtcgacgtaatcgaggccgggttccccgccgcctccaaggacgacttcgaagccgtgaaaaccatagccgaaaccgtgggaaacgccgtcgacggagacggttacgtccccgtcatctgcggactctcgagatgcaacaagagagatatcgagacggcgtgggaggctgtgaagtacgccaaaaggccgaggatccataccttcatcgccacgagtgacattcacttggagtataagctgaagaagagcaaagacgaggtcatcgaattcgctaggaatatggtaaagttcgcgaggagcttggggtgtgaggacgttgagtttagtcctgaagatgccggaagatcggagagagagtttttgtatcagattcttggggaagtgataaaagctggagcgacaacgcttaatatacctgacactgttggtataacgttgcctagtgagtttggtcagttgattgctgatatcaaagccaatactcctgggatcgagaatgttatcatctcaacgcattgtcagaatgatcttgggctctccactgccaacactttatctggtgcacattcgggtgcaaggcaagtggaagtgactatcaatggcattggcgaaagagctggaaacgcttcactagaagaggttgtgatggccataaaatgccgtggagatcatgtacttggaggcctatatactggaattgatactcggcacattgttatgacaagcaagatggttgaagattacacaggaatgcaaacacagccccataaggctattgtaggagcgaatgcctttgcgcatgaaagtggtattcatcaggatggaatgctcaaacacaagggcacatatgaaattatatgccccgaagaaattggacttgaacgatctaatgatgctggtattgttttggggaagcttagtgggcgtcatgcgttgaaagaccgtttgactgagcttggttatgtactagatgatgaacaactaagttccattttctggcgcttcaaatctgtggctgagcggaaaaagagagttaccgacgcagatataatagctttggtttctgatgaggttttccagccagaagctctgtggaaactcctggacattcagataacttgtgggactttggggctttcaacagcaaccgtgaaacttgctgacgctgatggcaaagagcatgttgcttgttctatgggaaccgggcctgtcgattcagcatataaggcagtcgatcttattgtcaaggaaccagcgactctgcttgagtactcaatgaatgcagtaacagaaggcatcgatgccattgcaaccacaagagttcttatccgaggaaacaacaattactcaactacaaacgcaatcactggtgaagaagttcaaaggacctttagtggaaccggagcaggaatggacatcgtggtctcgagcgtcaaagcttatgtcggagctctgaacaagatgctcgatttcaaagagaacacaacaacaaaaatcccttctcaaaacaacaaagtacctgcctga

SEQ ID NO: 6974 - protein, 623 aa, Brassica oleracea
MASSILRNPMLSSPTTITTPSLPSFSSKPSPLSFRFPPSHHRSSLRIKSLRLSCSLSDPSPPLRRCRPEYIPNRISDPNYVRVFDTTLRDGEQSPGATLTSKEKLDIARQLAKLGVDVIEAGFPAASKDDFEAVKTIAETVGNAVDGDGYVPVICGLSRCNKRDIETAWEAVKYAKRPRIHTFIATSDIHLEYKLKKSKDEVIEFARNMVKFARSLGCEDVEFSPEDAGRSEREFLYQILGEVIKAGATTLNIPDTVGITLPSEFGQLIADIKANTPGIENVIISTHCQNDLGLSTANTLSGAHSGARQVEVTINGIGERAGNASLEEVVMAIKCRGDHVLGGLYTGIDTRHIVMTSKMVEDYTGMQTQPHKAIVGANAFAHESGIHQDGMLKHKGTYEIICPEEIGLERSNDAGIVLGKLSGRHALKDRLTELGYVLDDEQLSSIFWRFKSVAERKKRVTDADIIALVSDEVFQPEALWKLLDIQITCGTLGLSTATVKLADADGKEHVACSMGTGPVDSAYKAVDLIVKEPATLLEYSMNAVTEGIDAIATTRVLIRGNNNYSTTNAITGEEVQRTFSGTGAGMDIVVSSVKAYVGALNKMLDFKENTTTKIPSQNNKVPA

SEQ ID NO: 6975 - DNA, 1518 bp, Brassica oleracea
  CDS (1)..(1518)
atggcatcgtcacttctgacatcttccggaattatccctaccaccagttccaacatggttgtccggtcattcttaccctttggatctgtccgcctgacccgtccgtacaacaagtcgtccttgctcatctcatgttgctcctctgtgtccaagaaggctgagactagtggtactgacctcaaaaccgttgtggaacggtggccagagtatattccgaacaagctccccgacaagaactacgtgcgtgtatttgatacgacgctccgtgacggcgaacaatctcccggtgcagcccttactccaccgcagaagatagagattgcccggcagctcgctaaactcagagtagacatcatggaagttggttttcccgtgtcatcagaggaagagttcgaaaccatcaaaaccatcgccaaaaccgtgggaaacgaggttgatgaggaaacaggttatatcccagtgatatgcgtcatcgcacgaagcaaagaaagagatataaaggcggcttgggagtcagtgaagtacgcaaagaggccgaggatagtcatattcacttctactagtgacattcacttgaaatataagttgaaaatgactagagaagaagtcgtcgagatggtcgcgagtagcattaggtttgctaaaagtttaggcttcgaagacatcgagtttggttgcgaagatggcggcaggtccgacaaggattatatatgcaaggtttttgaagaagcgatcaaagcgggtgcaaccaccctggcctgcccggacacggtggggatcaacatgccgcacgaatacgggaaacttgtgagatacatcaaagcaaacactcctggaattgatgatgttatcttcagcgctcattgtcacaatgaccttggtgttgctaccgccaacacaatcgccggtatatgtgcgggagcacgacaagtcgaagtaacaatcaatggaataggtgaaagaagtgggaatgcaccgcttgaagaggtcgtgatggctttgaaatgtcgaggagcatttgtgatgggtggtgtttacacaagaatagacacacgccaaattatggctaccagcaagatggttcaagaatatactggcttgtatgttcagccacataaacctatagttggagccaactgttttgttcatgagagcggcattcaccaggatgggatattgaaaaatcggagtacatatgagatcttatcaccagaagatgttggagttgtgaaatctcaaaattcaggcattgttcttggaaagcttagtggacgtcatgcggttaaaggtcgtctgaaagagttgggatatgaaatcagtgatgagaaactgaacgaggttttctcacggttcagagatttaaccaagcagaaaaagagagtcacggatgatgatctaagggcattagtaacgtgtggtgatgaaatcttctcctcagagaaattaaacggcactaacgacaacgaaatcaacagaaacggctatgtaccgtctcctcagatttcctctgtggtatga

SEQ ID NO: 6976 - protein, 505 aa, Brassica oleracea
MASSLLTSSGIIPTTSSNMVVRSFLPFGSVRLTRPYNKSSLLISCCSSVSKKAETSGTDLKTVVERWPEYIPNKLPDKNYVRVFDTTLRDGEQSPGAALTPPQKIEIARQLAKLRVDIMEVGFPVSSEEEFETIKTIAKTVGNEVDEETGYIPVICVIARSKERDIKAAWESVKYAKRPRIVIFTSTSDIHLKYKLKMTREEVVEMVASSIRFAKSLGFEDIEFGCEDGGRSDKDYICKVFEEAIKAGATTLACPDTVGINMPHEYGKLVRYIKANTPGIDDVIFSAHCHNDLGVATANTIAGICAGARQVEVTINGIGERSGNAPLEEVVMALKCRGAFVMGGVYTRIDTRQIMATSKMVQEYTGLYVQPHKPIVGANCFVHESGIHQDGILKNRSTYEILSPEDVGVVKSQNSGIVLGKLSGRHAVKGRLKELGYEISDEKLNEVFSRFRDLTKQKKRVTDDDLRALVTCGDEIFSSEKLNGTNDNEINRNGYVPSPQISSVV

SEQ ID NO: 6977 - DNA, 1323 bp, Saccharomyces cerevisiae
  CDS (1)..(1323)
atgtctgaaaataacgaattccagagtgtcaccgaatcgacgactgctccaaccactagtaacccatatggcccaaatcctgcggattatctatccaatgttaagaatttccagttgattgattcaacactaagagagggtgaacaatttgccaacgcattcttcgatactgaaaaaaagattgaaattgctagagccttggatgatttcggtgtggactacatcgagttaacctctcccgtagcatccgaacaatcaagaaaggactgtgaagctatatgtaaactaggtttaaaggccaagatccttacacacattcgttgtcacatggacgatgccagagtcgccgtagagactggtgtcgacggtgtcgatgttgttatcggcacctccaaatttttaagacaatattcccacggtaaggatatgaactacatcgccaagagtgctgttgaagtcattgaatttgtcaaatccaaaggtattgaaatcagattttcctctgaagattccttcagaagtgatctcgttgatcttttgaacatttataaaaccgttgacaagatcggtgtaaatagagtcggtattgccgacgcagttggatgtgccaacccaagacaagtatatgaactgatcagaactttgaagagtgttgtctcatgtgacatcgaatgccatttccacaatgataccggttgtgccattgcaaacgcctacactgctttggaaggtggtgccagattgattgacgtcagtgtactgggtattggtgaaagaaacggtatcactcctctaggtgggctcatggcaagaatgattgttgccgcaccagactatgtcagatctaaatacaagctgcacaagatcagagacatcgaaaacctggtcgctgatgctgtggaagttaacattccattcaacaaccctatcaccgggttctgtgcattcacacataaagcaggtatccatgccaaggccattttggctaacccatctacctacgaaatcttggaccctcacgatttcggtatgaagagatatatccacttcgccaacagactaactggttggaatgcaatcaaatcaagagtcgaccaattgaacttgaatttgacggatgatcaaatcaaggaagttactgctaagattaagaagctgggtgatgtcagaccgctaaatattgatgatgtagactccattatcaaggacttccatgcagaattgagcaccccacttttaaaaccagtaaataagggtacagatgacgacaatatcgatatttccaatgggcatgtttctaaaaaggcaaaggtcaccaaatag

SEQ ID NO: 6978 - protein, 440 aa, Saccharomyces cerevisiae
MSENNEFQSVTESTTAPTTSNPYGPNPADYLSNVKNFQLIDSTLREGEQFANAFFDTEKKIEIARALDDFGVDYIELTSPVASEQSRKDCEAICKLGLKAKILTHIRCHMDDARVAVETGVDGVDVVIGTSKFLRQYSHGKDMNYIAKSAVEVIEFVKSKGIEIRFSSEDSFRSDLVDLLNIYKTVDKIGVNRVGIADAVGCANPRQVYELIRTLKSVVSCDIECHFHNDTGCAIANAYTALEGGARLIDVSVLGIGERNGITPLGGLMARMIVAAPDYVRSKYKLHKIRDIENLVADAVEVNIPFNNPITGFCAFTHKAGIHAKAILANPSTYEILDPHDFGMKRYIHFANRLTGWNAIKSRVDQLNLNLTDDQIKEVTAKIKKLGDVRPLNIDDVDSIIKDFHAELSTPLLKPVNKGTDDDNIDISNGHVSKKAKVTK

SEQ ID NO: 6979 - DNA, 1437 bp, Thermoproteus tenax
  CDS (1)..(1437): transl_table=11
gtgggtcggttcagccgccatgagttcggggaaagcataaaaattctcgactcgacgctgagagagggcgagcagactccgggcgttatattctctgaggaatggaggatcaagatagcgaagtctctgtcggatgtaggcgtccacttaatagaggtgggcgacccaaacgtggcgcccgacgtcagatcggctatctcgaagataatagctctgaagcgagacggcgaaatcaagagcgagatagtcgtccacagcagatccgtcaaatcagatatagagaacgcgacgtcgcttgagcccgacagagtcgccatcttctacggcgtcagcgatatacatctgaagcacaaacacaggaagaccagagaggaggctttggccataatcgccgaacacgtggagttcgcgagaggcgccggcgtgaaggtgaggttcacagccgaagacgccactagggcagacctcgactaccttatacaagtggtaaaaactgcgcgagacgcaggcgcggacagagtgagcattgccgacacagtggggatactcactcccgatagagcgcgccaactcttctcgaagctgaaggaggccgtgcctggggtcggactagatatacacgcccacaacgacttagggatggccgtggccaactcaatggctgcgaccgagggcggagccgacgtagttcacacgacagtgaacggcctcggggagagagcaggtatcacccctctccaagtcttcgtcgcggcctactactaccacaagggcgtcaagctcatcgatatggcgaagctcccctacttggcctcgctggtggaggcggccagcgggatcgcccagatgcccaccttccccataactggcgacaatgtgttcactcacaaggccggcgtccaccaagcaggtgtactggcgaatccagagacctacgagccgtttccgcccgaggtcgtggggaggtcgagggacttctccctagacaaatatagcggaaggcgcgccgtggcccaccggcttgagagactcggcgtgaaggtagacgaggagactctggccaaagtcgtggaggagctcaaatccacgaacgcgaggaggcttagagacgaggacctcttggagatcttggagaaggtcacgggcgtgagatataaggcgtatgtaaacaaacatattgaggcgttcatctggataaaagtggacgaaaacgtatacaccacctcggtggcccgcagagtgtccacgattagcggcgtcgtcaacgtgggagaggtcactggggatttcgatatcgtcgcaagagtggtggcctccaacgctgaggaattgaacagaataatagaggatataaggtcggtcagaggcgttaaatccacgttgaccaacatagtgttgaaacagctgggctccctccaagcgccctccgccccttag

SEQ ID NO: 6980 - protein, 478 aa, Thermoproteus tenax
MGRFSRHEFGESIKILDSTLREGEQTPGVIFSEEWRIKIAKSLSDVGVHLIEVGDPNVAPDVRSAISKIIALKRDGEIKSEIVVHSRSVKSDIENATSLEPDRVAIFYGVSDIHLKHKHRKTREEALAIIAEHVEFARGAGVKVRFTAEDATRADLDYLIQVVKTARDAGADRVSIADTVGILTPDRARQLFSKLKEAVPGVGLDIHAHNDLGMAVANSMAATEGGADVVHTTVNGLGERAGITPLQVFVAAYYYHKGVKLIDMAKLPYLASLVEAASGIAQMPTFPITGDNVFTHKAGVHQAGVLANPETYEPFPPEVVGRSRDFSLDKYSGRRAVAHRLERLGVKVDEETLAKVVEELKSTNARRLRDEDLLEILEKVTGVRYKAYVNKHIEAFIWIKVDENVYTTSVARRVSTISGVVNVGEVTGDFDIVARVVASNAEELNRIIEDIRSVRGVKSTLTNIVLKQLGSLQAPSAP

SEQ ID NO: 6981 - DNA, 1512 bp, Arabidopsis thaliana
  CDS (1)..(1512)
atggcttcgttacttctcacatcgtcgagtatgataaccactagctgtccctccatggttctccggtcagggttacccatcggatcttcttttccctctcttcgcctgacccgtccatacgacaaggcgactctgttcgtctcatgttgctccgctgagtccaaaaaggtggcaactagtgctactgatctcaaacctatcatggaacggaggccggagtacattccgaacaagcttccccacaagaactatgtgcgtgtattagacacgacgcttcgtgacggtgaacaatctcccggtgcagcacttactccaccgcagaagttagagattgccaggcagctagctaaactccgagtagacatcatggaagttggttttccggtgtcgtctgaggaagaattcgaagctattaaaaccatcgccaagaccgtggggaacgaggtggatgaggaaaccggttacgttcctgtgatatgcggcattgcacgatgcaaaaagagagacatcgaggcaacttgggaggcactgaagtatgcgaagaggccgagggtaatgctattcacatctactagtgaaattcacatgaaatataagttgaaaaagactaaagaagaagtgatcgagatggccgtgaacagtgttaagtacgctaaaagcttgggcttcaaagacatccaatttgggtgcgaagatggcggcaggacggagaaagattttatatgtaagattctaggagaatcgataaaagcgggtgcaaccacggtggggtttgcggacacggtcgggatcaacatgccgcaagaattcggagaactcgtggcctatgtcatagaaaacactccaggggctgatgatattgtcttcgccattcattgtcataacgaccttggtgttgctaccgccaacacaatatccggtatatgtgcgggagcaagacaagtcgaagtgacgatcaacggaattggtgaaagaagtgggaatgcgccgcttgaagaggtagtgatggctttgaaatgtcgaggagaatctctgatggatggtgtttacacaaaaatagactcacgccaaattatggctacaagcaagatggttcaagagcataccggcatgtatgttcaaccacataagccaatagttggagacaactgttttgttcatgagagcggcattcaccaggatggaatattgaaaaatcgaagtacatatgagatcttatcaccagaagatgttgggatcgtaaaatctgaaaattctggcattgttcttggaaagcttagtggacgtcatgctgtaaaagaccggcttaaagagttgggatatgaaatcagtgatgagaaattcaacgacatcttctcacgatacagagaattaacgaaggacaaaaagagaatcacagacgctgatctgaaggcattagtggtgaacggtgctgaaatctcatcagaaaaattaaacagtaaaggaattaacgaccttatgtcaagccctcagatttccgctgttgtataa

SEQ ID NO: 6982 - protein, 503 aa, Arabidopsis thaliana
MASLLLTSSSMITTSCPSMVLRSGLPIGSSFPSLRLTRPYDKATLFVSCCSAESKKVATSATDLKPIMERRPEYIPNKLPHKNYVRVLDTTLRDGEQSPGAALTPPQKLEIARQLAKLRVDIMEVGFPVSSEEEFEAIKTIAKTVGNEVDEETGYVPVICGIARCKKRDIEATWEALKYAKRPRVMLFTSTSEIHMKYKLKKTKEEVIEMAVNSVKYAKSLGFKDIQFGCEDGGRTEKDFICKILGESIKAGATTVGFADTVGINMPQEFGELVAYVIENTPGADDIVFAIHCHNDLGVATANTISGICAGARQVEVTINGIGERSGNAPLEEVVMALKCRGESLMDGVYTKIDSRQIMATSKMVQEHTGMYVQPHKPIVGDNCFVHESGIHQDGILKNRSTYEILSPEDVGIVKSENSGIVLGKLSGRHAVKDRLKELGYEISDEKFNDIFSRYRELTKDKKRITDADLKALVVNGAEISSEKLNSKGINDLMSSPQISAVV

SEQ ID NO: 6983 - DNA, 1512 bp, Arabidopsis thaliana
  CDS (1)..(1512)
atggcttcgttacttctcacatcttccattatgataaccactagctgtccctccatggttctccggtcagcgttacccatcggatcttcttttccctctcttcgcctgacccgtccatacgacaaggcgactctgctcgtctcgtgttgctccgctgagtccaaaaaggtggcaactagtgctactgatctcaaacctatcatggaacggaggccggagtacattccgaacaagcttccccacaagaactatgtgcgtgtattagacacgacgcttcgtgacggtgaacaatctcccggtgcagcacttactccaccgcagaagttagagattgccaggcagctagctaaactccgagtagacatcatggaagttggttttccggtgtcgtctgaggaagaattcgaagctattaaaaccatcgccaagaccgtggggaacgaggtggatgaggaaaccggttacgttcctgtgatatgcggcattgcacgatgcaaaaagagagacatcgaggcaacttgggaggcactgaagtatgcgaagaggccgagggtaatgctattcacatctactagtgaaattcacatgaaatataagttgaaaaagactaaagaagaagtgatcgagatggccgtgaacagtgttaagtacgctaaaagcttgggcttcaaagacatccaatttgggtgcgaagatggcggcaggacggagaaagattttatatgtaagattctaggagaatcgataaaagcgggtgcaaccacggtggggtttgcggacacggtcgggatcaacatgccgcaagaattcggagaactcgtggcctatgtcatagaaaacactccaggggctgatgatattgtcttcgccattcattgtcataacgaccttggtgttgctaccgccaacacaatatccggtatatgtgcgggagcaagacaagtcgaagtgacgatcaacggaattggtgaaagaagtgggaatgcgccgcttgaagaggtcgtgatggctttgaaatgtcgaggagaatctctgatggatggtgtttacacaaaaatagactcacgccaaattatggctacaagcaagatggttcaagagcataccggcatgtatgttcaaccacataagccaatagttggagacaactgttttgttcatgagagcggcattcaccaggatggaatattgaaaaatcgaagtacatatgagatcttatcaccagaagatgttgggatcgtaaaatctgaaaattctggcattgttcttggaaagcttagcggacgtcatgctgtaaaagaccggcttaaagagttgggatatgaaatcagtgatgagaaattcaacgacatcttctcacgatacagagaattaacgaaggacaaaaagagaatcacagacgctgatctgaaggcattagtggtgaacggtgctgaaatctcatcagaaaaattaaacagtaaaggaattaacgaccttatgtcaagccctcagatttccgctgttgtataa

SEQ ID NO: 6984 - protein, 503 aa, Arabidopsis thaliana
MASLLLTSSIMITTSCPSMVLRSALPIGSSFPSLRLTRPYDKATLLVSCCSAESKKVATSATDLKPIMERRPEYIPNKLPHKNYVRVLDTTLRDGEQSPGAALTPPQKLEIARQLAKLRVDIMEVGFPVSSEEEFEAIKTIAKTVGNEVDEETGYVPVICGIARCKKRDIEATWEALKYAKRPRVMLFTSTSEIHMKYKLKKTKEEVIEMAVNSVKYAKSLGFKDIQFGCEDGGRTEKDFICKILGESIKAGATTVGFADTVGINMPQEFGELVAYVIENTPGADDIVFAIHCHNDLGVATANTISGICAGARQVEVTINGIGERSGNAPLEEVVMALKCRGESLMDGVYTKIDSRQIMATSKMVQEHTGMYVQPHKPIVGDNCFVHESGIHQDGILKNRSTYEILSPEDVGIVKSENSGIVLGKLSGRHAVKDRLKELGYEISDEKFNDIFSRYRELTKDKKRITDADLKALVVNGAEISSEKLNSKGINDLMSSPQISAVV

SEQ ID NO: 6985 - DNA, 1512 bp, Arabidopsis thaliana
  CDS (1)..(1512)
atggcttcgttacttctcacatcttccagtatgataaccactagctgtccctccatggttctccggtcagggttacccatcggatcttcttttccctctcttcgcctgacccgtccatacgacaaggcgactctgttcgtctcatgttgctccgctgagtccaaaaaggtggcaactagtgctactgatctcaaacctatcatggaacggaggccggagtacattccgaacaagcttccccacaagaactacgtgcgtgtattagacacgacgcttcgtgacggtgaacaatctcccggtgcagcacttactccaccgcagaagttagagattgccaggcagctagctaaactccgagtagacatcatggaagttggttttccggtgtcgtctgaggaagaattcgaagctattaaaaccatcgccaagaccgtggggaacgaggtggatgaggaaaccggttacgctcctgtgatatgcggcattgcacgatgcaaaaagagagacatcgaggcaacttgggaggcactgaagtatgcgaagaggccgagggtaatgctattcacatctactagtgaaattcacatgaaatataagttgaaaaagactaaagaagaagtgatcgagatggccgtgaacagtgttaagtacgctaaaagcttgggcttcaaagacatccaatttgggtgcgaagatggcggcaggacggagaaagattttttatgtaagattctaggagaatcgataaaagcgggtgcaaccacggtggggtttgcggacacggtcgggatcaacatgccgcaagaattcggagaactcgtggcctatgtcatagaaaacactccaggggctgatgatattgtcttcgccattcattgtcataacgaccttggtgttgctaccgccaacacaatatccggtatatgtgcgggagcaagacaagtcgaagtgacgatcaacggaattggtgaaagaagtgggaatgcgccgcttgaagaggtcgtgatggctttgaaatgtcgaggagaatctctgatggatggtgtttacacaaaaatagactcacgccaaattatggctacaagcaagatggttcaagagcataccggcatgtatgttcaaccacataagccaatagttggagacaactgttttgttcatgagagcggcattcaccaggatggaatattgaaaaatcgaagtacatatgagatcttatcaccagaagatgttgggatcgtaaaatctgaaaattctggcattgttcttggaaagcttagcggacgtcatgctgtaaaagaccggcttaaagagttgggatatgaaatcagtgatgagaaattcaacgacatcttctcacgatacagagaattaacgaaggacaaaaagagaatcacagacgctgatctgaaggcattagtggtgaacggtgctgaaatctcatcagaaaaattaaacagtaaaggaattaacgaccttatgtcaagccctcagatttccgctgttgtataa

SEQ ID NO: 6986 - protein, 503 aa, Arabidopsis thaliana
MASLLLTSSSMITTSCPSMVLRSGLPIGSSFPSLRLTRPYDKATLFVSCCSAESKKVATSATDLKPIMERRPEYIPNKLPHKNYVRVLDTTLRDGEQSPGAALTPPQKLEIARQLAKLRVDIMEVGFPVSSEEEFEAIKTIAKTVGNEVDEETGYAPVICGIARCKKRDIEATWEALKYAKRPRVMLFTSTSEIHMKYKLKKTKEEVIEMAVNSVKYAKSLGFKDIQFGCEDGGRTEKDFLCKILGESIKAGATTVGFADTVGINMPQEFGELVAYVIENTPGADDIVFAIHCHNDLGVATANTISGICAGARQVEVTINGIGERSGNAPLEEVVMALKCRGESLMDGVYTKIDSRQIMATSKMVQEHTGMYVQPHKPIVGDNCFVHESGIHQDGILKNRSTYEILSPEDVGIVKSENSGIVLGKLSGRHAVKDRLKELGYEISDEKFNDIFSRYRELTKDKKRITDADLKALVVNGAEISSEKLNSKGINDLMSSPQISAVV

SEQ ID NO: 6987 - DNA, 1512 bp, Arabidopsis thaliana
  CDS (1)..(1512)
atggcttcgttacttctcacatcgtcgagtatgataaccactagctgtccctccatggttctccggtcagggttacccatcggatcttcttttccctctcttcgcctgacccgtccatacgacaaggcgactctgtccgtctcatgttgctccgctgagtccaaaaaggtggcaactagtgctactgatctcaaacctatcatggaacggaggccggagtacattccgaacaagcttccccacaagaactatgtgcgtgtattagacacgacgcttcgtgacggtgaacaatctcccggtgcagcacttactccaccgcagaagttagagattgccaggcagctagctaaactccgagtagacatcatggaagttggttttccggtgtcgtctgaggaagaattcgaagctattaaaaccatcgccaagaccgtggggaacgaggtggatgaggaaaccggttacgttcctgtgatatgcggcattgcacgatgcaaaaagagagacatcgaggcaacttgggaggcactgaagtatgcgaagaggccgagggtaatgctattcacatctactagtgaaattcacatgaaatataagttgaaaaagactaaagaagaagtgatcgagatggccgtgaacagtgttaagtacgctaaaagcttgggcttcaaagacatccaatttgggtgcgaagatggcggcaggacggagaaagattttatatgtaagattctaggagaatcgataaaagcgggtgcaaccacggtggggtttgcggacacggtcgggatcaacatgccgcaagaattcggagaactcgtggcctatgtcatagaaaacactccaggggctgatgatattgtcttcgccattcattgtcataacgaccttggtgttgctaccgccaacacaatatccggtatatgtgcgggagcaagacaagtcgaagtgacgatcaacggaattggtgaaagaagtgggaatgcgccgcttgaagaggtagtgatggctttgaaatgtcgaggagaatctctgatggatggtgtttacacaaaaatagactcacgccaaattatggctacaagcaagatggttcaagagcataccggcatgtatgttcaaccacataagccaatagttggagacaactgttttgttcatgagagcggcattcaccaggatggaatattgaaaaatcgaagtacatatgagatcttatcaccagaagatgttgggatcgtaaaatctgaaaattctggcattgttcttggaaagcttagtggacgtcatgctgtaaaagaccggcttaaagagttgggatatgaaatcagtgatgagaaattcaacgacatcttctcacgatacagagaattaacgaaggacaaaaagagaatcacagacgctgatctgaaggcattagtggtgaacggtgctgaaatctcatcagaaaaattaaacagtaaaggaattaacgaccttatgtcaagccctcagatttccgctgttgtataa

SEQ ID NO: 6988 - protein, 503 aa, Arabidopsis thaliana
MASLLLTSSSMITTSCPSMVLRSGLPIGSSFPSLRLTRPYDKATLSVSCCSAESKKVATSATDLKPIMERRPEYIPNKLPHKNYVRVLDTTLRDGEQSPGAALTPPQKLEIARQLAKLRVDIMEVGFPVSSEEEFEAIKTIAKTVGNEVDEETGYVPVICGIARCKKRDIEATWEALKYAKRPRVMLFTSTSEIHMKYKLKKTKEEVIEMAVNSVKYAKSLGFKDIQFGCEDGGRTEKDFICKILGESIKAGATTVGFADTVGINMPQEFGELVAYVIENTPGADDIVFAIHCHNDLGVATANTISGICAGARQVEVTINGIGERSGNAPLEEVVMALKCRGESLMDGVYTKIDSRQIMATSKMVQEHTGMYVQPHKPIVGDNCFVHESGIHQDGILKNRSTYEILSPEDVGIVKSENSGIVLGKLSGRHAVKDRLKELGYEISDEKFNDIFSRYRELTKDKKRITDADLKALVVNGAEISSEKLNSKGINDLMSSPQISAVV

SEQ ID NO: 6989 - DNA, 1521 bp, Arabidopsis thaliana
  CDS (1)..(1521)
atggcttcatcgcttctgacatcttccggtatgatccctaccaccggttccaccgtggttggccggtcagtgttaccctttcaatcttccctgcactctctccgcctgacccattcgtacaagaaccccgcattgttcatctcatgttgctcttctgtgtccaaaaatgcggcaactagttctactgatctcaaacccgctgtggaacggtggccggagtacttaccgaacaagcttcccgacgaaaactatgtgcgtgtattcgacacgacgctccgtgacggtgaacaagctcctggtggatccctcactccaccgcagaagcaagagattgcccgacagctcgctaaactccgagtagacatcatggaagtcggttttccgggatcatctgaagaagagttagaaaccgttaagaccatcgccaagaccgtgggaaatgaggtggatgaggaaacaggctacgtccctgtgatatgcgccatagctcgaagcaaacatagagacattgaggcggcttgggaggcggtgaagtacgcgaagaggccaaggatactcatattcacatctactagtgacattcacatgaaatataagttgaaaaagactcaagaagaagtgattgagatggccgtgagtagtattaggttcgctaaaagcttaggcttcaatgacatccaacttgggtgcgaagatggcggcaggtcggacaaggattttctatgcaagattcttggagaagccataaaagccggtgttacggtggtgaacgtcgcggatacggtagggatcaacatgccacatgaatacgcggaactcgtgacctatctcaaagcaaacacccctggaattgacgatgttgtcttcagtgttcattgtcacaacgaccttggtcttgcaaccgccaactcaatcgccggtatacgtgcgggagcaagacaggtcgaagtaactatcaacggaattggtgaaagaagtggcaatgcgtcgcttgaggaggtggtgatggctttgaaatgtcgaggggcatatgtgatcaatggtgtttacacaagaatagacacacgtcaaatcatggctaccagcaagatggttcaagagtacacgggcttgtatgttcaagcacataagcccatagttggagcgaactgttttgttcatgagagcggcattcatcaggatggaatattgaaaaataggagtacttatgagatcttatcaccagaagatattgggattgtaaaatctcaaaattccggccttgttcttggaaagcttagtggacgtcacgctgtgaaagatcggctgaaagagttgggatatgaactcgatgatgagaaattgaacgctgtcttctcactattcagagatttaaccaagaataaaaagagaatcacagatgctgatatgaaggcattagtaacatctagcgatggaatttctttagagaaatcaaacggcgctaacggtttaaagtctaacggctatataccagttcttcaggtttcatctaatgtataa

SEQ ID NO: 6990 - protein, 506 aa, Arabidopsis thaliana
MASSLLTSSGMIPTTGSTVVGRSVLPFQSSLHSLRLTHSYKNPALFISCCSSVSKNAATSSTDLKPAVERWPEYLPNKLPDENYVRVFDTTLRDGEQAPGGSLTPPQKQEIARQLAKLRVDIMEVGFPGSSEEELETVKTIAKTVGNEVDEETGYVPVICAIARSKHRDIEAAWEAVKYAKRPRILIFTSTSDIHMKYKLKKTQEEVIEMAVSSIRFAKSLGFNDIQLGCEDGGRSDKDFLCKILGEAIKAGVTVVNVADTVGINMPHEYAELVTYLKANTPGIDDVVFSVHCHNDLGLATANSIAGIRAGARQVEVTINGIGERSGNASLEEVVMALKCRGAYVINGVYTRIDTRQIMATSKMVQEYTGLYVQAHKPIVGANCFVHESGIHQDGILKNRSTYEILSPEDIGIVKSQNSGLVLGKLSGRHAVKDRLKELGYELDDEKLNAVFSLFRDLTKNKKRITDADMKALVTSSDGISLEKSNGANGLKSNGYIPVLQVSSNV

SEQ ID NO: 6991 - DNA, 1521 bp, Arabidopsis thaliana
  CDS (1)..(1521)
atggcttcatcgcttctgacatcttccggtatgatccctaccaccggttccaccgtggttggccggtcagtgttaccctttcaatcttccctgcactctctccgcctgacccattcgtacaagaaccccgcattgttcatctcatgttgctcttctgtgtccaaaaatgcggcaactagttctactgatctcaaacccgttgtggaacggtggccggagtacataccgaacaagcttcccgacgaaaactatgtgcatgtattcgacacgacgctccgtgacggtgaacaagctcctggtggatccctcactccaccgcagaagctagagattgcccgacagctcgctaaactccgagtagacatcatggaagtcggttttccgggatcatctgaagaagagttagaaaccgttaagaccatcgccaagaccgtgggaaatgaggtggatgaggaaacaggctacgtccctgtgatatgcgccatagctcgaagcaaacatagagacattgaggcggcttgggaggcggtgaagtacgcgaagaggccaaggatactcatattcacatctactagtgacattcacatgaaatataagttgaaaaagactcaagaagaagtgattgagatggccgtgagtagtattaggttcgctaaaagcttaggcttcaatgacatccaacttgggtgcgaagatggcggcaggtcggacaaggattttctatgcaagattcttggagaagccataaaagccggtgttacggtggtgaacgtcgcggatacggtagggatcaacatgccacatgaatacgcggaactcgtgacctatctcaaagcaaacacccctggaattgacgatgttgtcttcagtgttcattgtcacaacgaccttggtcttgcaaccgccaactcaatcgccggtatacgtgcgggagcaagacaggtcgaagtaactatcaacggaattggtgaaagaagtggcaatgcgtcgcttgaggaggtggtgatggctttgaaatgtcgaggggcatatgtgatcaatggtgtttacacaagaatagacacacgtcaaatcatggctaccagcaagatggttcaagagtacacgggcttgtatgttcaagcacataagcccatagttggagcgaactgttttgttcatgagagcggcattcatcaggatggaatattgaaaaataggagtacttatgagatcttatcaccagaagatattgggattgtaaaatctcaaaattccggccttgttcttggaaagcttagtggacgtcacgctgtgaaagatcggctgaaagagttgggatatgaactcgatgatgagaaattgaacgttgtcttctcactattcagagatttaaccaagaataaaaagagaatcacggatgctgatttgaaggcattagtaacatctagcgatgaaatctctttggagaaattaaacggcgctaacggtttaaagtctaacggctatataccagttcttcaggtttcatcgaatgtgtaa

SEQ ID NO: 6992 - protein, 506 aa, Arabidopsis thaliana
MASSLLTSSGMIPTTGSTVVGRSVLPFQSSLHSLRLTHSYKNPALFISCCSSVSKNAATSSTDLKPVVERWPEYIPNKLPDENYVHVFDTTLRDGEQAPGGSLTPPQKLEIARQLAKLRVDIMEVGFPGSSEEELETVKTIAKTVGNEVDEETGYVPVICAIARSKHRDIEAAWEAVKYAKRPRILIFTSTSDIHMKYKLKKTQEEVIEMAVSSIRFAKSLGFNDIQLGCEDGGRSDKDFLCKILGEAIKAGVTVVNVADTVGINMPHEYAELVTYLKANTPGIDDVVFSVHCHNDLGLATANSIAGIRAGARQVEVTINGIGERSGNASLEEVVMALKCRGAYVINGVYTRIDTRQIMATSKMVQEYTGLYVQAHKPIVGANCFVHESGIHQDGILKNRSTYEILSPEDIGIVKSQNSGLVLGKLSGRHAVKDRLKELGYELDDEKLNVVFSLFRDLTKNKKRITDADLKALVTSSDEISLEKLNGANGLKSNGYIPVLQVSSNV

SEQ ID NO: 6993 - DNA, 1521 bp, Arabidopsis thaliana
  CDS (1)..(1521)
atggcttcatcgcttctgacatcttccggtatgatccctaccaccggttccaccgtggttggccggtcagtgttaccctttcaatcttccctgcactctctccgcctgacccattcgtacaagaaccccgcattgttcatctcatgttgctcttctgtgtccaaaaatgcggcaactagttctactgatctcaaacccgctgtggaacggtggccggagtacttaccgaacaagcttcccgacgaaaactatgtgcgtgtattcgacacgacgctccgtgacggtgaacaagctcctggtggatccctcactccaccgcagaagctagagattgcccgacagctcgctaaactccgagtagacatcatggaagtcggttttccgggatcatctgaagaagagttagaaaccgttaagaccatcgccaagaccgtgggaaatgaggtggatgaggaaacaggctacgtccctgtgatatgcgccatagctcgaagcaaacatagagacattgaggcggcttgggaggcggtgaagtacgcgaagaggccaaggatactcatattcacatctactagtgacattcacatgaaatataagttgaaaaagactcaagaagaagtgattgagatggccgtgagtagtattaggttcgctaaaagcttaggcttcaatgacatccaacttgggtgcgaagatggcggcaggtcggacaaggattttctatgcaagattcttggagaagccataaaagccggtgttacggtggtgaacgtcgcggatacggtagggatcaacatgccacatgaatacgcggaactcgtgacctatctcaaagcaaacacccctggaattgacgatgttgtcttcagtgttcattgtcacaacgaccttggtcttgcaaccgccaactcaatcgccggtatacgtgcgggagcaagacaggtcgaagtaactatcaacggaattggtgaaagaagtggcaatgcgtcgcttgaggaggtggtgatggctttgaaatgtcgaggggcatatgtgatcaatggtgtttacacaagaatagacacacgtcaaatcatggctaccagcaagatggttcaagagtacacgggcttgtatgttcaagcacataagcccatagttggagcgaactgttttgttcatgagagcggcattcatcaggatggaatattgaaaaataggagtacttatgagatcttatcaccagaagatattgggattgtaaaatctcaaaattccggccttgttcttggaaagcttagtggacgtcacgctgtgaaagatcggctgaaagagttgggatatgaactcgatgatgagaaattgaacgctgtcttctcactattcagagatttaaccaagaataaaaagagaatcacagatgctgatatgaaggcattagtaacatctagcgatggaatttctttagagaaatcaaacggcgctaacggtttaaagtctaacggctatataccagttcttcaggtttcatctaatgtgtaa

SEQ ID NO: 6994 - protein, 506 aa, Arabidopsis thaliana
MASSLLTSSGMIPTTGSTVVGRSVLPFQSSLHSLRLTHSYKNPALFISCCSSVSKNAATSSTDLKPAVERWPEYLPNKLPDENYVRVFDTTLRDGEQAPGGSLTPPQKLEIARQLAKLRVDIMEVGFPGSSEEELETVKTIAKTVGNEVDEETGYVPVICAIARSKHRDIEAAWEAVKYAKRPRILIFTSTSDIHMKYKLKKTQEEVIEMAVSSIRFAKSLGFNDIQLGCEDGGRSDKDFLCKILGEAIKAGVTVVNVADTVGINMPHEYAELVTYLKANTPGIDDVVFSVHCHNDLGLATANSIAGIRAGARQVEVTINGIGERSGNASLEEVVMALKCRGAYVINGVYTRIDTRQIMATSKMVQEYTGLYVQAHKPIVGANCFVHESGIHQDGILKNRSTYEILSPEDIGIVKSQNSGLVLGKLSGRHAVKDRLKELGYELDDEKLNAVFSLFRDLTKNKKRITDADMKALVTSSDGISLEKSNGANGLKSNGYIPVLQVSSNV

SEQ ID NO: 6995 - DNA, 1521 bp, Arabidopsis thaliana
  CDS (1)..(1521)
atggcttcatcgcttctgacatcttccgttatgatccctaccaccggctccaccgtggttggccggtcagtgttaccctttcaatcttccctgcactctctccgcctgacccattcgtacaagaagcccgcattgttcatctcatgttgctcttctgtgtccaaaaatgcggcaactagttctactgatctcaaacccgttgtggaacggtggccggagtacataccgaacaagcttcccgacggaaactatgtgcgtgtattcgacacgacgctccgtgacggtgaacaatctcctggtggatccctcactccgccgcagaagctagagattgcccgacagctcgctaaactccgagtagacatcatggaagtcggttttccgggatcatctgaagaagagttagaaaccattaagaccatcgccaagactgtggggaatgaggtggatgaggaaacaggttacgtccctgtgatatgcgccatagctcgatgcaaacatagagacattgaggcgacttgggaggcgctgaagtacgcgaagaggccaaggatactcgtattcacatctactagtgacattcacatgaaatataagttgaaaaagactcaagaagaagtgattgagatggccgtgagtagtattaggtttgctaaaagcttgggcttcaatgacatccagtttgggtgcgaagatggcggcaggtcggacaaggatttcctatgcaagattctaggagaagccataaaagccggtgttacggtggtgaccatcggtgatacggtagggatcaacatgccacatgaatacggggaactcgtgacttatctcaaagcaaacacccctggaattgacgatgttgtcgtcgctgttcattgtcacaacgaccttggtcttgcaaccgccaactcaatcgccggtatacgtgcgggagcaagacaggtcgaagtaactatcaacggaattggtgaaagaagtggcaatgcgtcgcttgaggaggtcgtgatggctttgaaatgtcgaggggcatatgtgatcaatggggtttacacaaaaatagacacacgccaaatcatggctaccagcaagatggttcaagagtacacgggcttgtatgttcaagcacataagcccatagttggagcgaactgttttgttcatgagagcggcattcatcaggatggaatattgaaaaataggagtacttatgagatcttatcaccagaagatattgggattgtaaaatctcaaaattccggccttgttcttggaaagcttagtggacgtcacgctgtgaaagatcggctgaaagagttgggatatgaactcgatgatgagaaattgaacgctgtcttctcactattcagagatttaaccaagaataaaaagagaatcacggatgctgatttgaaggcattagtaacatctagcgatgaaatctctttggagaaattaaacggcgctaacggtttaaagtctaacggctatataccagttcctcaggtttcatcgaatgtgtaa

SEQ ID NO: 6996 - protein, 506 aa, Arabidopsis thaliana
MASSLLTSSVMIPTTGSTVVGRSVLPFQSSLHSLRLTHSYKKPALFISCCSSVSKNAATSSTDLKPVVERWPEYIPNKLPDGNYVRVFDTTLRDGEQSPGGSLTPPQKLEIARQLAKLRVDIMEVGFPGSSEEELETIKTIAKTVGNEVDEETGYVPVICAIARCKHRDIEATWEALKYAKRPRILVFTSTSDIHMKYKLKKTQEEVIEMAVSSIRFAKSLGFNDIQFGCEDGGRSDKDFLCKILGEAIKAGVTVVTIGDTVGINMPHEYGELVTYLKANTPGIDDVVVAVHCHNDLGLATANSIAGIRAGARQVEVTINGIGERSGNASLEEVVMALKCRGAYVINGVYTKIDTRQIMATSKMVQEYTGLYVQAHKPIVGANCFVHESGIHQDGILKNRSTYEILSPEDIGIVKSQNSGLVLGKLSGRHAVKDRLKELGYELDDEKLNAVFSLFRDLTKNKKRITDADLKALVTSSDEISLEKLNGANGLKSNGYIPVPQVSSNV

SEQ ID NO: 6997 - DNA, 1521 bp, Arabidopsis thaliana
  CDS (1)..(1521)
atggcttcatcgcttttgacatcttccggtatgatccctaccaccggttccaccgtggttggccggtcagtgttaccctttcaatcttccctgcactctctccgcctgacccattcgtacaagaaccccacattgttcatctcatgttgctcttctgtgtccaaaaatgcggcaactagttctactgatctcaaacccgttgtggaacggtggccggagtacataccgaacaagcttcccgacggaaactatgtgcgtgtattcgacacgacgctccgtgacggtgaacaatctcctggtggatccctcactccgccgcagaagctagagattgcccgacagctcgctaaactccgagtagacatcatggaagtcggttttccgggatcatctgaagaagagttagaaaccattaagaccatcgccaagactgtggggaatgaggtggatgaggaaacaggttacgtccctgtgatatgcgccatagctcgatgcaaacatagagacattgaggcgacttgggaggcgctgaagtacgcgaagaggccaaggatactcgtattcacatctactagtgacattcacatgaaatataagttgaaaaagactcaagaagaagtgattgagatggccgtgagtagtattaggttcgctaaaagcttgggcttcaatgacatccagtttgggtgcgaagatggcggcaggtcggacaaggatttcctatgcaagattctaggagaagccataaaagccggtgttacggtggtgaccatcggtgatacggtagggatcaacatgccacatgaatacggggaactcgtgacttatctcaaagcaaacacccctggaattgacgatgttgtcgtcgctgttcattgtcacaacgaccttggtcttgcaaccgccaactcaatcgccggtatacgtgcgggagcaagacaggtcgaagtaactatcaacggaattggtgaaagaagtggcaatgcgtcgcttgaggaggtcgtgatggctttgaaatgtcgaggggcatatgtgatcaatggggtttacacaaaaatagacacacgccaaatcatggctaccagcaagatggttcaagagtacacgggcttgtatgttcaagcacataagcccatagttggagcgaactgttttgttcatgagagcggcattcatcaggatggaatattgaaaaataggagtacttatgagatcttatcaccagaagatattgggattgtaaaatctcaaaattccggccttgttcttggaaagcttagtggacgtcacgctgtgaaagatcggctgaaagagttgggatatgaactcgatgatgagaaattgaacgctgtcttctcactattcagagatttaaccaagaataaaaagagaatcacggatgctgatttgaaggcattagtaacatctagcgatgaaatctctttggagaaattaaacggcgctaacggtttaaagtctaacggctacataccagttcctcaggtttcgtcgactgtgtaa

SEQ ID NO: 6998 - protein, 506 aa, Arabidopsis thaliana
MASSLLTSSGMIPTTGSTVVGRSVLPFQSSLHSLRLTHSYKNPTLFISCCSSVSKNAATSSTDLKPVVERWPEYIPNKLPDGNYVRVFDTTLRDGEQSPGGSLTPPQKLEIARQLAKLRVDIMEVGFPGSSEEELETIKTIAKTVGNEVDEETGYVPVICAIARCKHRDIEATWEALKYAKRPRILVFTSTSDIHMKYKLKKTQEEVIEMAVSSIRFAKSLGFNDIQFGCEDGGRSDKDFLCKILGEAIKAGVTVVTIGDTVGINMPHEYGELVTYLKANTPGIDDVVVAVHCHNDLGLATANSIAGIRAGARQVEVTINGIGERSGNASLEEVVMALKCRGAYVINGVYTKIDTRQIMATSKMVQEYTGLYVQAHKPIVGANCFVHESGIHQDGILKNRSTYEILSPEDIGIVKSQNSGLVLGKLSGRHAVKDRLKELGYELDDEKLNAVFSLFRDLTKNKKRITDADLKALVTSSDEISLEKLNGANGLKSNGYIPVPQVSSTV

SEQ ID NO: 6999 - DNA, 1464 bp, Brassica oleracea
  CDS (1)..(1464)
atggttgtccggtcattcttaccctttggatctgtccgcctgacccgtccgtacaacaagtcgtccttgctcatctcatgttgctcctctgtgtccaagaaggctgagactagtggtactgacctcaaaaccgttgtggaacggtggccagagtatattccgaacaagctccccgacaagaactacgtgcgtgtatttgatacgacgctccgtgacggcgaacaatctcccggtgcagcccttactccaccgcagaagatagagattgcccggcagctcgctaaactcagagtagacatcatggaagttggttttcccgtgtcatcagaggaagagttcgaaaccatcaaaaccatcgccaaaaccgtgggaaacgaggttgatgaggaaacaggttatatcccagtgatatgcgtcatcgcacgaagcaaagaaagagatataaaggcggcttgggagtcagtgaagtacgcaaagaggccgaggatagtcatattcacttctactagtgacattcacttgaaatataagttgaaaatgactagagaagaagtcgtcgagatggtcgcgagtagcattaggtttgctaaaagtttaggcttcgaagacatcgagtttggttgcgaagatggcggcaggtccgacaaggattatatatgcaaggtttttgaagaagcgatcaaagcgggtgcaaccaccctggcctgcccggacacggtggggatcaacatgccgcacgaatacgggaaacttgtgagatacatcaaagcaaacactcctggaattgatgatgttatcttcagcgctcattgtcacaatgaccttggtgttgctaccgccaacacaatcgccggtatatgtgcgggagcacgacaagtcgaagtaacaatcaatggaataggtgaaagaagtgggaatgcaccgcttgaagaggtcgtgatggctttgaaatgtcgaggagcatttgtgatgggtggtgtttacacaagaatagacacacgccaaattatggctaccagcaagatggttcaagaatatactggcttgtatgttcagccacataaacctatagttggagccaactgttttgttcatgagagcggcattcaccaggatgggatattgaaaaatcggagtacatatgagatcttatcaccagaagatgttggagttgtgaaatctcaaaattcaggcattgttcttggaaagcttagtggacgtcatgcggttaaaggtcgtctgaaagagttgggatatgaaatcagtgatgagaaactgaacgaggttttctcacggttcagagatttaaccaagcagaaaaagagagtcacggatgatgatctaagggcattagtaacgtgtggtgatgaaatcttctcctcagagaaattaaacggcactaacgacaacgaaatcaacagaaacggctatgtaccgtctcctcagatttcctctgtggtatga

SEQ ID NO: 7000 - protein, 487 aa, Brassica oleracea
MVVRSFLPFGSVRLTRPYNKSSLLISCCSSVSKKAETSGTDLKTVVERWPEYIPNKLPDKNYVRVFDTTLRDGEQSPGAALTPPQKIEIARQLAKLRVDIMEVGFPVSSEEEFETIKTIAKTVGNEVDEETGYIPVICVIARSKERDIKAAWESVKYAKRPRIVIFTSTSDIHLKYKLKMTREEVVEMVASSIRFAKSLGFEDIEFGCEDGGRSDKDYICKVFEEAIKAGATTLACPDTVGINMPHEYGKLVRYIKANTPGIDDVIFSAHCHNDLGVATANTIAGICAGARQVEVTINGIGERSGNAPLEEVVMALKCRGAFVMGGVYTRIDTRQIMATSKMVQEYTGLYVQPHKPIVGANCFVHESGIHQDGILKNRSTYEILSPEDVGVVKSQNSGIVLGKLSGRHAVKGRLKELGYEISDEKLNEVFSRFRDLTKQKKRVTDDDLRALVTCGDEIFSSEKLNGTNDNEINRNGYVPSPQISSVV

SEQ ID NO: 7001 - DNA, 1173 bp, Tremblaya princeps
  CDS (1)..(1173): transl_table=11
atggcacgtagcagacgtaggcgcatcgccatcctagacactacgctccgtgatggcgagcaggcgccgtgcatagtaatggggccagatgctaaagcagagatggccaggcgccttgagatagcgggcgtggatgtcgtcgaggctgggttcgcagcaagttcgtcctcagactttgaggcaatccgtcgcatatcttgctgcgtacggggttgcgtggtgtgctcgctagccagagcagtcgggcatgatgtcaggaaggcagccaaggctctcgagttcgctcggcaccctaggatccatgtctttatagggtcatctagtctgcacatagaggaaaagctaaggatgcatccacttgatgtggttgacagggctgcggcgatggtgcggctggcaagggcatattgcgacgacgttgagttctcaccagaggactcaagccgggctgatccttcgttcctatgcagcctggcgaaggcggccgtagaagctggcgccacaatagttaacgtaactgacactgttggccatggcatcccggagcagcttagcgacgttgctggtatgctgtgccgctctgtgcccatatctgacagggtcacgctttctgtgcactgccataacgacgttgggctggctctcgctaacactatggcagcaatagcatgctgcgcgggacaggcggagtgtactgtgaccggcataggagagagggctggaaacgctgcccttgaggaggtcgtggttgcagctgggctagagtactcgggcgctgggatggacgttcgcgtggacgctaggcacatgaggtccattgcacagcttgcgtccgcgattgcacgacggaggttgcctgcaactaagcctgtggttggatgccatgccttcgcacacgcctcaggtatacaccaggacggagtgataaagaaccgcaggacatacgaggcactaagggctgaggacgttggtggaagaggcggtagcatagtgctagggaagctttccggtacccatgcactgagaaataggctcgaaggcggtggggtcaccatcggtgcaatgggtgttcctaggctggctactatgatgaaggggctagccagccatttgcccgtagtatatgactccgcactggctgcgctccatgccattgcatcccgtccttgctag

SEQ ID NO: 7002 - protein, 390 aa, Tremblaya princeps
MARSRRRRIAILDTTLRDGEQAPCIVMGPDAKAEMARRLEIAGVDVVEAGFAASSSSDFEAIRRISCCVRGCVVCSLARAVGHDVRKAAKALEFARHPRIHVFIGSSSLHIEEKLRMHPLDVVDRAAAMVRLARAYCDDVEFSPEDSSRADPSFLCSLAKAAVEAGATIVNVTDTVGHGIPEQLSDVAGMLCRSVPISDRVTLSVHCHNDVGLALANTMAAIACCAGQAECTVTGIGERAGNAALEEVVVAAGLEYSGAGMDVRVDARHMRSIAQLASAIARRRLPATKPVVGCHAFAHASGIHQDGVIKNRRTYEALRAEDVGGRGGSIVLGKLSGTHALRNRLEGGGVTIGAMGVPRLATMMKGLASHLPVVYDSALAALHAIASRPC

SEQ ID NO: 7003 - DNA, 1521 bp, Arabidopsis thaliana
  CDS (1)..(1521)
atggcttcatcgcttctgacatcttccggtatgatccctaccaccggttccaccgtggttggccggtcagtgttaccctttcaatcttccctgcactctctccgcctgacccattcgtacaagaaccccgcattgttcatctcatgttgctcttctgtgtccaaaaatgcggcaactagttctactgatctcaaacccgctgtggaacggtggccggagtacttaccgaacaagcttcccgacgaaaactatgtgcgtgtattcgacacgacgctccgtgacggtgaacaagctcctggtggatccctcactccaccgcagaagctagagattgcccgacagctcgctaaactccgagtagacatcatggaagtcggttttccgggatcatctgaagaagagttagaaaccgttaagaccatcgccaagaccgtgggaaatgaggtggatgaggaaacaggctacgtccctgtgatatgcgccatagctcgaagcaaacatagagacattgaggcggcttgggaggcggtgaagtacgcgaagaggccaaggatactcatattcacatctactagtgacattcacatgaaatataagttgaaaaagactcaagaagaagtgattgagatggccgtgagtagtattaggttcgctaaaagcttaggcttcaatgacatccaacttgggtgcgaagatggcggcaggtcggacaaggattttctatgcaagattcttggagaagccataaaagccgatgttacggtggtgaacgtcgcggatacggtagggatcaacatgccacatgaatacgcggaactcgtgacctatctcaaagcaaacacccctggaattgacgatgttgtcttcagtgttcattgtcacaacgaccttggtcttgcaaccgccaactcaatcgccggtatacgtgcgggagcaagacaggtcgaagtaactatcaacggaattggtgaaagaagtggcaatgcgtcgcttgaggaggtggtgatggctttgaaatgtcgaggggcatatgtgatcaatggtgtttacacaagaatagacacacgtcaaatcatggctaccagcaagatggttcaagagtacacgggcttgtatgttcaagcacataagcccatagttggagcgaactgttttgttcatgagagcggcattcatcaggatggaatattgaaaaataggagtacttatgagatcttatcaccagaagatattgggattgtaaaatctcaaaattccggccttgttcttggaaagcttagtggacgtcacgctgtgaaagatcggctgaaagagttgggatatgaactcgatgatgagaaattgaacgctgtcttctcactattcagagatttaaccaagaataaaaagagaatcacagatgctgatatgaaggcattagtaacatctagcgatggaatttctttagagaaatcaaacggcgctaacggtttaaagtctaacggctatataccagttcttcaggtttcatctaatgtgtaa

SEQ ID NO: 7004 - protein, 506 aa, Arabidopsis thaliana
MASSLLTSSGMIPTTGSTVVGRSVLPFQSSLHSLRLTHSYKNPALFISCCSSVSKNAATSSTDLKPAVERWPEYLPNKLPDENYVRVFDTTLRDGEQAPGGSLTPPQKLEIARQLAKLRVDIMEVGFPGSSEEELETVKTIAKTVGNEVDEETGYVPVICAIARSKHRDIEAAWEAVKYAKRPRILIFTSTSDIHMKYKLKKTQEEVIEMAVSSIRFAKSLGFNDIQLGCEDGGRSDKDFLCKILGEAIKADVTVVNVADTVGINMPHEYAELVTYLKANTPGIDDVVFSVHCHNDLGLATANSIAGIRAGARQVEVTINGIGERSGNASLEEVVMALKCRGAYVINGVYTRIDTRQIMATSKMVQEYTGLYVQAHKPIVGANCFVHESGIHQDGILKNRSTYEILSPEDIGIVKSQNSGLVLGKLSGRHAVKDRLKELGYELDDEKLNAVFSLFRDLTKNKKRITDADMKALVTSSDGISLEKSNGANGLKSNGYIPVLQVSSNV

SEQ ID NO: 7005 - DNA, 1512 bp, Arabidopsis thaliana
  CDS (1)..(1512)
atggcttcgttacttctcacatcttccagtatgataaccactagctgtccctccatggttctccggtcagggttacccatcggatcttcttttccctctcttcgcctgacccgtccatacgacaaggcgactctgttcgtctcatgttgctccgctgagtccaaaaaggtggcaactagtgctactgatctcaaacctatcgtggaacggaggccggagtacattccgaacaagcttccccacaagaactatgtgcgtgtattagacacaacgcttcgtgacggtgaacaatctcccggtgcagcacttactccaccgcagaagttagagattgccaggcagctagctaaactccgagtagacatcatggaagttggttttccggtgtcgtctgaggaagaattcgaagctattaaaaccatcgccaagaccgtggggaacgaggtggatgaggaaaccggttacgttcctgtgatatgcggcattgcacgatgcaaaaagagagacatcgaggcaacttgggaggcactgaagtatgcgaagaggccgagggtaatgctattcacatctactagtgaaattcacatgaaatataagttgaaaaagactaaagaagaagtgatcgagatggccgtgaacagtgttaagtacgctaaaagcttgggcttcaaagacatccaatttgggtgcgaagatggcggcaggacggagaaagattttctatgtaagattctaggagaatcgataaaagcgggtgcaaccacggtggggtttgcggacacggtcgggatcaacatgccgcaagaattcggagaactcgtggcctatgtcatagaaaacactccaggggctgatgatattgtcttcgccattcattgtcataacgaccttggtgttgctaccgccaacacaatatccggtatatgtgcgggagcaagacaagtcgaagtgacgatcaacggaattggtgaaagaagtgggaatgcgccgcttgaagaggtcgtgatggctttgaaatgtcgaggagaatctctgatggatggtgtttacacaaaaatagactcacgccaaattatggctacaagcaagatggttcaagagcataccggcatgtatgttcaaccacataagccaatagttggagacaactgttttgttcatgagagcggcattcaccaggatggaatattgaaaaatcgaagtacatatgagatcttatcaccagaagatgttgggatcgtaaaatctgaaaattctggcattgttcttggaaagcttagtggacgtcatgctgtaaaagaccggcttaaagagttgggatatgaaatcagtgatgagaaattcaacgacatcttctcacgatacagagaattaacgaaggacaaaaagagaatcacagacgctgatctgaaggcattagtggtgaacggtgctgaaatctcatcagaaaaattaaacagtaaaggaattaacgaccttatgtcaagccctcagatttccgctgttgtataa

SEQ ID NO: 7006 - protein, 503 aa, Arabidopsis thaliana
MASLLLTSSSMITTSCPSMVLRSGLPIGSSFPSLRLTRPYDKATLFVSCCSAESKKVATSATDLKPIVERRPEYIPNKLPHKNYVRVLDTTLRDGEQSPGAALTPPQKLEIARQLAKLRVDIMEVGFPVSSEEEFEAIKTIAKTVGNEVDEETGYVPVICGIARCKKRDIEATWEALKYAKRPRVMLFTSTSEIHMKYKLKKTKEEVIEMAVNSVKYAKSLGFKDIQFGCEDGGRTEKDFLCKILGESIKAGATTVGFADTVGINMPQEFGELVAYVIENTPGADDIVFAIHCHNDLGVATANTISGICAGARQVEVTINGIGERSGNAPLEEVVMALKCRGESLMDGVYTKIDSRQIMATSKMVQEHTGMYVQPHKPIVGDNCFVHESGIHQDGILKNRSTYEILSPEDVGIVKSENSGIVLGKLSGRHAVKDRLKELGYEISDEKFNDIFSRYRELTKDKKRITDADLKALVVNGAEISSEKLNSKGINDLMSSPQISAVV

SEQ ID NO: 7007 - DNA, 1512 bp, Arabidopsis thaliana
  CDS (1)..(1512)
atggcttcgttacttctcacatcgtcgagtatgataaccactagctgtcgctccatggttctccggtcagggttacccatcggatcttcttttccctctcttcgcctgacccgtccatacgacaaggcgactctgttcgtctcatgttgctccgctgagtccaaaaaggtggcaactagtgctactgatctcaaacctatcatggaacggaggccggagtacattccgaacaagcttccccacaagaactacgtgcgtgtattagacacgacgcttcgtgacggtgaacaatctcccggtgcagcacttactccaccgcagaagttagagattgccaggcagctagctaaactccgagtagacatcatggaagttggttttccggtgtcgtctgaggaagaattcgaagctattaaaaccatcgccaagaccgtggggaacgaggtggatgaggaaaccggttacgctcctgtgatatgcggcattgcacgatgcaaaaagagagacatcgaggcaacttgggaggcactgaagtatgcgaagaggccgagggtaatgctattcacatctactagtgaaattcacatgaaatataagttgaaaaagactaaagaagaagtgatcgagatggccgtgaacagtgttaagtacgctaaaagcttgggcttcaaagacatccaatttgggtgcgaagatggcggcaggacggagaaagattttttatgtaagattctaggagaatcgataaaagcgggtgcaaccacggtggggtttgcggacacggtcgggatcaacatgccgcaagaattcggagaactcgtggcctatgtcatagaaaacactccaggggctgatgatattgtcttcgccattcattgtcataacgaccttggtgttgctaccgccaacacaatatccggtatatgtgcgggagcaagacaagtcgaagtgacgatcaacggaattggtgaaagaagtgggaatgcgccgcttgaagaggtcgtgatggctttgaaatgtcgaggagaatctctgatggatggtgtttacacaaaaatagactcacgccaaattatggctacaagcaagatggttcaagagcataccggcatgtatgttcaaccacataagccaatagttggagacaactgttttgttcatgagagcggcattcaccaggatggaatattgaaaaatcgaagtacatatgagatcttatcaccagaagatgttgggatcgtaaaatctgaaaattctggcattgttcttggaaagcttagcgacgttcatgctgtaaaagaccggcttaaagagttgggatatgaaatcagtgatgagaaattcaacgacatcttctcacgatacagagaattaacgaaggacaaaaagagaatcacagacgctgatctgaaggcattagtggtgaacggtgctgaaatctcatcagaaaaattaaacagtaaaggaattaacgaccttatgtcaagccctcagatttccgctgttgtataa

SEQ ID NO: 7008 - protein, 503 aa, Arabidopsis thaliana
MASLLLTSSSMITTSCRSMVLRSGLPIGSSFPSLRLTRPYDKATLFVSCCSAESKKVATSATDLKPIMERRPEYIPNKLPHKNYVRVLDTTLRDGEQSPGAALTPPQKLEIARQLAKLRVDIMEVGFPVSSEEEFEAIKTIAKTVGNEVDEETGYAPVICGIARCKKRDIEATWEALKYAKRPRVMLFTSTSEIHMKYKLKKTKEEVIEMAVNSVKYAKSLGFKDIQFGCEDGGRTEKDFLCKILGESIKAGATTVGFADTVGINMPQEFGELVAYVIENTPGADDIVFAIHCHNDLGVATANTISGICAGARQVEVTINGIGERSGNAPLEEVVMALKCRGESLMDGVYTKIDSRQIMATSKMVQEHTGMYVQPHKPIVGDNCFVHESGIHQDGILKNRSTYEILSPEDVGIVKSENSGIVLGKLSDVHAVKDRLKELGYEISDEKFNDIFSRYRELTKDKKRITDADLKALVVNGAEISSEKLNSKGINDLMSSPQISAVV

SEQ ID NO: 7009 - DNA, 1512 bp, Arabidopsis thaliana
  CDS (1)..(1512)
atggcttcgttacttctcacatcgtcgagtatgataaccactagctgtcgctccatggttctccggtcagggttacccatcggatcttcttttccctctcttcgcctgacccgtccatacgacaaggcgactctgttcgtctcatgttgctccgctgagtccaaaaaggtggcaactagtgctactgatctcaaacctatcatggaacggaggccggagtacattccgaacaagcttccccacaagaactatgtgcgtgtattagacacgacgcttcgtgacggtgaacaatctcccggtgcagcacttactccaccgcagaagttagagattgccaggcagctagctaaactccgagtagacatcatggaagttggttttccggtgtcgtctgaggaagaattcgaagctattaaaaccatcgccaagaccgtggggaacgaggtggatgaggaaaccggttacgttcctgtgatatcaggcattgcacgatgcaaaaagagagacatcgaggcaacttgggaggcactgaagtatgcgaagaggccgagggtaatgctattcacatctactagtgaaattcacatgaaatataagttgaaaaagactaaagaagaagtgatcgagatggccgtgaacagtgttaagtacgctaaaagcttgggcttcaaagacatccaatttgggtgcgaagatggcggcaggacggagaaagattttatatgtaagattctaggagaatcgataaaagcgggtgcaaccacggtggggtttgcggacacggtcgggatcaacatgccgcaagaattcggagaactcgtggcctatgtcatagaaaacactccaggggctgatgatattgtcttcgccattcattgtcataacgaccttggtgttgctaccgccaacacaatatccggtatatgtgcgggagcaagacaagtcgaagtgacgatcaacggaattggtgaaagaagtgggaatgcgccgcttgaagaggtcgtgatggctttgaaatgtcgaggagaatctctgatggatggtgtttacacaaaaatagactcacgccaaattatggctacaagcaagatggttcaagagcataccggcatgtatgttcaaccacataagccaatagttggagacaactgttttgttcatgagagcggcattcaccaggatggaatattgaaaaatcgaagtacatatgagatcttatcaccagaagatgttgggatcgtaaaatctgaaaattctggcattgttcttggaaagcttagcggacgtcatgctgtaaaagaccggcttaaagagttgggatatgaaatcagtgatgagaaattcaacgacatcttctcacgatacagagaattaacgaaggacaaaaagagaatcacagacgctgatctgaaggcattagtggtgaacggtgctgaaatctcatcagaaaaattaaacagtaaaggaattaacgaccttatgtcaagccctcagatttccgctgttgtataa

SEQ ID NO: 7010 - protein, 503 aa, Arabidopsis thaliana
MASLLLTSSSMITTSCRSMVLRSGLPIGSSFPSLRLTRPYDKATLFVSCCSAESKKVATSATDLKPIMERRPEYIPNKLPHKNYVRVLDTTLRDGEQSPGAALTPPQKLEIARQLAKLRVDIMEVGFPVSSEEEFEAIKTIAKTVGNEVDEETGYVPVISGIARCKKRDIEATWEALKYAKRPRVMLFTSTSEIHMKYKLKKTKEEVIEMAVNSVKYAKSLGFKDIQFGCEDGGRTEKDFICKILGESIKAGATTVGFADTVGINMPQEFGELVAYVIENTPGADDIVFAIHCHNDLGVATANTISGICAGARQVEVTINGIGERSGNAPLEEVVMALKCRGESLMDGVYTKIDSRQIMATSKMVQEHTGMYVQPHKPIVGDNCFVHESGIHQDGILKNRSTYEILSPEDVGIVKSENSGIVLGKLSGRHAVKDRLKELGYEISDEKFNDIFSRYRELTKDKKRITDADLKALVVNGAEISSEKLNSKGINDLMSSPQISAVV

SEQ ID NO: 7011 - DNA, 1137 bp, Acetobacter diazotrophicus
  CDS (1)..(1137): transl_table=11
atgtcggaaaacgcgcgtctgctgatcagcgacaccaccctgcgcgatggagagcaggcgccgggggtggcctttaccgcgtgggaaaagctggccatcgccggcgccctcgacgcggccggcgtggatgagatcgaggccggcgttccggccatgggggatgccgagatcgccatgatcgcggcgatcggcgacgaggtggaacgcgcccgcgtcatcccctggtgtcgcatgcgcgacgaagacgtgcacgcggcgcggcggacggggctgggcagcgtgcacctgtccgtttcgacctcgtccggcagatccaggcgaaataccgcatgtcgcgcgtcgcacgctggacatggcgcgcgagtcgtctcccgcgccagggattacggcctggcggtgtcggtggggggcgaggacgccagccgggccgatccggcctatctggtcgatctgctgggcgtgatcgccgaggcaggggcgttccgcttccgcttcgccgatacgctgggcgtgatggacccgttcggcgtgcacgaggtcatgcggtatctctgccagtccagcccgcttcagcttgaatttcacggccatgacgatctgggcctggcaacggccaatacgctggccgccgtgcgggccggcgcggcgtgcgccagtgtcaccgtcctgggactgggcgaacgcgcgggcaacgccccgctggaggaagtggtggcgggggtatatcgcctgctgggccgtccggcgggcgtgaagctggacagcctgcccgggcttgccaccctggtctcgcgcgccgccgtgcgtgatatcccgcccgacaaggcgatcgtcggcgacgcggtctttcgtcatgaatcgggcatccatgtctcgggcctgctgcgtgacgccgcgacgtatgaggcactggaccccgtgcagttcggccgccagcgcgaaatcgtgctgggcaagcattccggccgggccgcggtacggcacgcgctggcggcgctgggcctggatgccgacgaaaccgtcatcgcggccacgcttgccgccgtgcgcgcgcgtgcctccgccgccaagcgcacggtggcgctggccgaactggccgaaatgcatgcgggcctgatggcaggcgtgtcgaaataa

SEQ ID NO: 7012 - protein, 378 aa, Acetobacter diazotrophicus
MSENARLLISDTTLRDGEQAPGVAFTAWEKLAIAGALDAAGVDEIEAGVPAMGDAEIAMIAAIGDEVERARVIPWCRMRDEDVHAARRTGLGSVHLSVSTSSGRSRRNTACRASHAGHGARVVSRARDYGLAVSVGGEDASRADPAYLVDLLGVIAEAGAFRFRFADTLGVMDPFGVHEVMRYLCQSSPLQLEFHGHDDLGLATANTLAAVRAGAACASVTVLGLGERAGNAPLEEVVAGVYRLLGRPAGVKLDSLPGLATLVSRAAVRDIPPDKAIVGDAVFRHESGIHVSGLLRDAATYEALDPVQFGRQREIVLGKHSGRAAVRHALAALGLDADETVIAATLAAVRARASAAKRTVALAELAEMHAGLMAGVSK

SEQ ID NO: 7013 - DNA, 1146 bp, Anabaena variabilis
  CDS (1)..(1146): transl_table=11
atgaataaagttctcattaatgacactacattacgtgatggcgaacaagccgcaggtgttgtttttaccttagaagagaaagtggcgatcgctaaatttctcgataccatcggcgtacccgaattagaagtggggattccggcgatgggtgaggaagaaatgcgggcgatctgcgccatttctaacttaggtttaaaagctaacctcctggcgtggaaccgcgccgtaatttcagatatcaaagcttctgttgcttgcgggatggagcgagtgcatattgcgatccctgtttccgggattcaaatcgccgcaaaattccacggacaatggcgggtaagtctgcaaagactcaaagattgtatcagcttcgcagttgatcaaggtctttgggtagcagtcgggggggaagattcctctagagctgatgaaaacttcctcttggatgtagcactatacgctcaagaatggggtgcatctcgattccgcttctgtgacacagtaggagtcctcgatcctttcaccacctacggaaaagttaagctactcgtctcagctttaacaattcctgtagaagtccatactcacaatgattttggtatggcgacagctaacgccctagcaggaattaaagctggagccgcatctgtcaatactaccgtgattggcttgggtgaaagagcaggtaacgccgccttagaagaagtcgttatggctatcaaacgcatctatggcgtagatatggggattgacacaccccgtttgttggaattgtcccaactggtagcagccgcctctggtgctaacgtaccaccttggaaggcgatcgttggtgaaaatacctttgctcacgaatcaggtattcatgcacatggtgtactgcaaaatcctgatacctatgaaccattcgcacctgaagaagtcggttgggaacgccgcttagttgtaggtaagcattctggcagacattcagtctccaacttgctagaacagcacgggatatttttgaacccagaagaaacccagtctgttttagatgcagtgcgccaacagtcagttaagaaaaaacgcagtttgactacagaagaactgttgaaccttggtcaaagaacagaggtattctcatgcagcgcgatgaaaacgagttag

SEQ ID NO: 7014 - protein, 381 aa, Anabaena variabilis
MNKVLINDTTLRDGEQAAGVVFTLEEKVAIAKFLDTIGVPELEVGIPAMGEEEMRAICAISNLGLKANLLAWNRAVISDIKASVACGMERVHIAIPVSGIQIAAKFHGQWRVSLQRLKDCISFAVDQGLWVAVGGEDSSRADENFLLDVALYAQEWGASRFRFCDTVGVLDPFTTYGKVKLLVSALTIPVEVHTHNDFGMATANALAGIKAGAASVNTTVIGLGERAGNAALEEVVMAIKRIYGVDMGIDTPRLLELSQLVAAASGANVPPWKAIVGENTFAHESGIHAHGVLQNPDTYEPFAPEEVGWERRLVVGKHSGRHSVSNLLEQHGIFLNPEETQSVLDAVRQQSVKKKRSLTTEELLNLGQRTEVFSCSAMKTS

SEQ ID NO: 7015 - DNA, 1140 bp, Anabaena variabilis
  CDS (1)..(1140): transl_table=11
atgaataaagttctaattaatgacactacactacgcgatggagagcaagcggcgggtgttgcttttagcgtagaggaaaaaatcgcgatcgccaaatttctggatgcgatcggtgtggatgaaatcgaagtgggaatacccgcaatgggtaaagcagaacaagaggcgatcgctaatattgtgaagttgaatttgtccgccaatctacttggttggaaccgcgccgtgatttctgatattcaggcttccatcgcttgtggtttacagcgagtacatatctctattcccgtttctgcaatccaaatcgccgccaaatttcacggacaatggcaagtagttttacaaaaactccacgacagtattagctttgctgttgaccaaggtttatttgtatccatcggtggtgaagactcatcaagagccgaagaaagcttcctccttgatgtagtactggctgctcaagaatggggtgccttacggtttcgcttttgtgacacagtaggtattcttgacccatttactacccacgccaaaataaaacaattggtggcatctttgacaatacctgtagaaatgcacacccacaatgattttggtttggcaacagctaacgctctcgcaggtatcaaagcaggcgctttatcggtaaatactactgtgaatggattgggtgaacgagctgggaatgctgctttagaagaggtggttatggctctcaagcacttgtatcaccatgatttaggaattgatacgcggcgtttactggaaatatctcaactcgtagtatcagcatcaggtcatcctgtaccaccttggaaagcaattgttggtgaaaatacttttgctcacgaatccgggattcatgctcatggtgtactgcaaaatccccagacctacgaaccatttgcaccagaagaagtagggagagagcgccgtttagttgtgggtaaacattctggtagacctttaggcatgtccagtattttgcagcaacacgacattattctcaatcacgaagaaacccaatctgtcttagatgcagttagacaagaatcagtgagaaaaaaaacgcagtctcacacctcaagaacttttacatttagtgcagacaaaaactacattttcgtgcctgttgaatga

SEQ ID NO: 7016 - protein, 379 aa, Anabaena variabilis
MNKVLINDTTLRDGEQAAGVAFSVEEKIAIAKFLDAIGVDEIEVGIPAMGKAEQEAIANIVKLNLSANLLGWNRAVISDIQASIACGLQRVHISIPVSAIQIAAKFHGQWQVVLQKLHDSISFAVDQGLFVSIGGEDSSRAEESFLLDVVLAAQEWGALRFRFCDTVGILDPFTTHAKIKQLVASLTIPVEMHTHNDFGLATANALAGIKAGALSVNTTVNGLGERAGNAALEEVVMALKHLYHHDLGIDTRRLLEISQLVVSASGHPVPPWKAIVGENTFAHESGIHAHGVLQNPQTYEPFAPEEVGRERRLVVGKHSGRPLGMSSILQQHDIILNHEETQSVLDAVRQESVRKKTQSHTSRTFTFSADKNYIFVPVE

SEQ ID NO: 7017 - DNA, 1476 bp, Methanococcus jannaschii
  CDS (1)..(1476): transl_table=11
atgatggtaaggatatttgatacaacacttagagatggagagcaaacaccaggagtttctttaacaccaaatgataagttagagatagcaaaaaaattggatgagcttggagttgatgttatagaggcaggttcagctataacttcaaaaggagagagagaaggaataaaattaataacaaaagaaggtttaaatgcagaaatctgctcatttgttagagctttacctgtagatattgatgctgccttagaatgtgatgtagatagtgtccatttagtagtgccaacatctccaatacacatgaaatataagcttagaaaaacagaagatgaggttttagagacagctttaaaggctgtagagtatgctaaagaacatggattgattgttgagttatctgcagaggatgcaacaagaagtgatgtaaatttcttaataaaactatttaatgaaggggaaaaggttggagcagacagagtttgtgtttgtgacacagtaggagttttaactccacaaaagagtcaggaattatttaaaaaaataactgaaaatgttaatttaccggtctcagttcattgccacaacgactttggaatggctactgctaatacttgctcagcagttttaggtggagctgttcagtgccacgtaacagttaatggtattggagagagagcaggaaatgcctcattggaagaggttgttgctgctttaaaaatactctatggctatgatactaagataaagatggaaaagttatatgaggtttcaagaattgtctcaagattgatgaaacttcctgttccaccaaataaagcaattgttggggacaatgcatttgctcatgaagcaggaatacatgttgatggattaataaaaaatactgaaacctatgagccaataaaaccagaaatggttgggaatagaagaagaattattttgggtaagcattctggtagaaaagctttaaaatacaaacttgatttgatgggcataaacgttagtgatgagcaattaaataaaatatatgaaagagttaaagaatttggggatttgggtaaatacatttcagacgctgatttgttggctatagttagagaagttactggaaaattggtagaagagaaaatcaaattagatgaattaactgttgtatctggaaataaaataacaccaattgcatctgttaaactccattataaaggagaagatataactttaatagaaactgcttatggtgttggaccggtagatgcagcaataaatgctgtgagaaaggcaataagtggagttgcagatattaagttggtagagtatagagttgaagcaattggtggaggaactgatgcgttaatagaggttgttgttaaattaagaaaaggaactgaaattgttgaagttagaaaatcagacgctgatataataagggcttctgtagatgctgtaatggaaggaatcaatatgttattgaattaa

SEQ ID NO: 7018 - protein, 491 aa, Methanococcus jannaschii
MMVRIFDTTLRDGEQTPGVSLTPNDKLEIAKKLDELGVDVIEAGSAITSKGEREGIKLITKEGLNAEICSFVRALPVDIDAALECDVDSVHLVVPTSPIHMKYKLRKTEDEVLETALKAVEYAKEHGLIVELSAEDATRSDVNFLIKLFNEGEKVGADRVCVCDTVGVLTPQKSQELFKKITENVNLPVSVHCHNDFGMATANTCSAVLGGAVQCHVTVNGIGERAGNASLEEVVAALKILYGYDTKIKMEKLYEVSRIVSRLMKLPVPPNKAIVGDNAFAHEAGIHVDGLIKNTETYEPIKPEMVGNRRRIILGKHSGRKALKYKLDLMGINVSDEQLNKIYERVKEFGDLGKYISDADLLAIVREVTGKLVEEKIKLDELTVVSGNKITPIASVKLHYKGEDITLIETAYGVGPVDAAINAVRKAISGVADIKLVEYRVEAIGGGTDALIEVVVKLRKGTEIVEVRKSDADIIRASVDAVMEGINMLLN

SEQ ID NO: 7019 - DNA, 1500 bp, Methanopyrus kandleri
  CDS (1)..(1500): transl_table=11
ttgcccgatcgggtacggatcttcgacacgacgctaagagacggtgagcagacaccgggcgtcagcctcacggtggaggaaaaggtcgagatcgcgaggaagttggacgagttcggcgtggataccatcgaagcgggcttccccgtagccagtgagggtgagttcgaggcagtgagggcgatagcaggcgaggaactggacgcggagatatgcgggttggccaggtgcgtgaagggggacatagacgcggcgatcgacgccgacgtggactgcgtgcacgtgttcatagccacgtcggacatccacctcagatacaagttggagatgtcccgggaagaggcattggagcgtgccatagagggcgtggagtatgccagtgaccacggagtcaccgtggagttctccgcggaggacgccacacggacggaccgggactacctactcgaggtctataaagctaccgtggaagccggcgcggatcgtgtcaacgtcccggatactgtgggagttatgacccctcccgagatgtatcgactgacggcggaagttgtcgacgccgtagacgtgccggtcagcgtgcactgccacaacgacttcggcatggccgtggccaactcattggccgccgtcgaagccggggctgaacaggttcatgtgaccgtgaacgggatcggcgagcgtgccggtaacgcctcgctggaacaggtcgtaatggccctcaaagcgctgtacgatatcgagttggacgtgaggaccgagatgctcgtcgagctctcacggctcgtggagcgactgacgggcgtcgtagtaccgccgaacaccccgatagtcggcgagaacgccttcgcccacgagtcggggattcactcccacggcgtgatcaagaaggcggagacgtacgaacctatacggcccgaggacgtcggtcatagacggcgtatagtactaggtaagcacgccggtcggcacgcgatcaagaagaagctcgaggagatggggatcgaggtcacggaggaacaactcgacgagatcgttcggcgcgtcaaggagctcggggataagggcaagcgcgtcaccgaagacgatcttgaagccatagcccgagacgtcgtcggcgaggtacccgagtccgaagctgcggtcaagctggaagagatcgccgtgatgaccgggaacaaattcacgccgacggcgtcggtccgtgtgtacctggacggtgaagagcacgaagcggcatcgaccggtgtgggctccgttgacgcggcgatacgggcactgcgcgaagcgatcgaggagctcggtatggacgtggagctgaaggagtaccgcctagaggccatcaccgggggcaccgacgccctcgccgaggtcacggtgaggttggaggacgaggacgggaacgtcaccacggcccgcggtgccgccgaggatatcgtgatggccagcgtgaaggcgttcgttcggggcgtgaatcggctggcacgtcgacgtagggactaa

SEQ ID NO: 7020 - protein, 499 aa, Methanopyrus kandleri
MPDRVRIFDTTLRDGEQTPGVSLTVEEKVEIARKLDEFGVDTIEAGFPVASEGEFEAVRAIAGEELDAEICGLARCVKGDIDAAIDADVDCVHVFIATSDIHLRYKLEMSREEALERAIEGVEYASDHGVTVEFSAEDATRTDRDYLLEVYKATVEAGADRVNVPDTVGVMTPPEMYRLTAEVVDAVDVPVSVHCHNDFGMAVANSLAAVEAGAEQVHVTVNGIGERAGNASLEQVVMALKALYDIELDVRTEMLVELSRLVERLTGVVVPPNTPIVGENAFAHESGIHSHGVIKKAETYEPIRPEDVGHRRRIVLGKHAGRHAIKKKLEEMGIEVTEEQLDEIVRRVKELGDKGKRVTEDDLEAIARDVVGEVPESEAAVKLEEIAVMTGNKFTPTASVRVYLDGEEHEAASTGVGSVDAAIRALREAIEELGMDVELKEYRLEAITGGTDALAEVTVRLEDEDGNVTTARGAAEDIVMASVKAFVRGVNRLARRRRD

SEQ ID NO: 7021 - DNA, 1287 bp, Saccharomyces cerevisiae
  CDS (1)..(1287)
atgactgctgctaaaccaaatccatatgctgccaaaccgggcgactatctttctaatgtaaataatttccagttaatcgattcgacgctgagagaaggtgaacaatttgccaacgcattcttcgatactgaaaaaaagatcgaaattgctagagccttggacgatttcggtgtggactacatcgagttaacctcaccagtagcatctgaacaatcaagaaaggactgtgaagctatatgtaaactaggtttaaaggccaagatccttacacacattcgttgtcatatggatgacgccaaagtcgccgtagagactggtgtcgacggtgtcgatgtcgttatcggcacctccaaatttttaagacaatattcccacggtaaggatatgaactacatcgccaagagtgctgttgaagtcattgaatttgtcaaatccaaaggtattgaaatcagattttcctctgaagattccttcagaagtgatctcgttgatcttttgaacatttataaaaccgttgacaagatcggtgtaaatagagtcggtattgccgacacagttggatgtgccaacccaagacaagtatatgaactgatcagaactttgaagagtgttgtttcatgtgacatcgaatgccatttccacaacgatactggttgtgccattgcaaacgcctacactgctttggaaggtggtgccagattgattgacgtcagtgtactgggtattggtgaaagaaacggtatcactcctctaggtgggctcatggcaagaatgattgttgccgcaccagactatgtcaagtccaaatacaagttgcacaagatcagagacattgaaaacctggtcgctgatgctgtggaagttaacattccattcaacaaccctatcaccgggttctgtgcattcacacataaagcaggtatccatgccaaggccattttggctaacccatctacctacgaaatcttggaccctcacgatttcggtatgaagaggtatatccacttcgccaacagactaactggctggaacgccatcaaagccagagtcgaccagttgaacttgaacttgacggatgaccaaatcaaggaagttactgctaagattaagaagctgggtgatgtcagatcgctgaatatcgatgatgttgactctatcatcaagaacttccacgcagaggtcagcactcctcaagtactatctgcaaaaaagaacaagaagaatgacagcgatgtaccggaactggccaccatccccgccgccaagcggactaagccatccgcctaa

SEQ ID NO: 7022 - protein, 428 aa, Saccharomyces cerevisiae
MTAAKPNPYAAKPGDYLSNVNNFQLIDSTLREGEQFANAFFDTEKKIEIARALDDFGVDYIELTSPVASEQSRKDCEAICKLGLKAKILTHIRCHMDDAKVAVETGVDGVDVVIGTSKFLRQYSHGKDMNYIAKSAVEVIEFVKSKGIEIRFSSEDSFRSDLVDLLNIYKTVDKIGVNRVGIADTVGCANPRQVYELIRTLKSVVSCDIECHFHNDTGCAIANAYTALEGGARLIDVSVLGIGERNGITPLGGLMARMIVAAPDYVKSKYKLHKIRDIENLVADAVEVNIPFNNPITGFCAFTHKAGIHAKAILANPSTYEILDPHDFGMKRYIHFANRLTGWNAIKARVDQLNLNLTDDQIKEVTAKIKKLGDVRSLNIDDVDSIIKNFHAEVSTPQVLSAKKNKKNDSDVPELATIPAAKRTKPSA

SEQ ID NO: 7023 - DNA, 1425 bp, Penicillium chrysogenum
  CDS (1)..(1425)
atggtgctcctgccaccgtcgctgccagtatgtcaattgaaagtcactgcgccagaatttccctctaacttttatttagacggcgaccactctggtttcgttggcattgaaactcgccagaacccccacccctccgcatcccgcaacccctacggccacgacgctggcgtcaccgatttccttagcaatgtctcacgcttccagattattgagtctactttgcgtgagggagagcagttcgccaacgctttcttcgataccgccaagaagatcgagattgccaaggctctcgatgacttcggtgtggactacatcgagctcactagtccctgtgcttctgagcagtcacgtgcggattgcgaggccatttgcaagctcggcctgaaggctaagattctcactcacattcgctgccatatggatgatgcccgtattgctgtcgagaccggtgttgatggagtcgatgttgttatcggtacttcttcttacctccgtgagcactctcacggcaaggacatgacctacatcaagaacgccgccattgaagttattgagttcgtcaagtctaagggcattgagatccgtttctccagcgaggactctttccgttccgacctggttgaccttctgtccatctactccgctgtggacaaggttggtgtgaaccgtgtcggtattgccgacaccgttggctgtgcttccccccgtcaggtctacgagctcgtccgtgtcctgcgcggtgttgttggctgtgacatcgagactcacttccacaacgacactggctgtgccattgccaacgccttctgtgccctcgaggccggtgccactcacatcgatacctccgttctcggtatcggtgagcgtaacggtatcacccctctcggtggtctgatggcccgcatgatggtcgccgaccgcgagtacgtcaagagcaagtacaagctcgagaagctcaaggagattgaggacctcgtcgccgaggccgttgaggtcaacattcctttcaacaactacatcaccggattctgcgccttcacccacaaggctggtatccacgccaaggctatcctcaacaaccccagcacttacgagattatcaaccccgccgacttcggcatgtcccgttacgtccacttcgcctcccgtttgaccggctggaacgccatcaagtcgcgtgctcagcagctcaagcttgagatgactgacactcaatacaaggagtgcactgccaagatcaaggccatggctgatattcgtcccattgccgtcgatgatgctgacagcattatccgtgcctaccaccgtaacctgaagtccggcgagaacaagcccctccttgacctgactgctgaggagcaggccgcatttgccgccaaggagaaggaactccttgaggcccaggctgccggtcttcccgtatag

SEQ ID NO: 7024 - protein, 474 aa, Penicillium chrysogenum
MVLLPPSLPVCQLKVTAPEFPSNFYLDGDHSGFVGIETRQNPHPSASRNPYGHDAGVTDFLSNVSRFQIIESTLREGEQFANAFFDTAKKIEIAKALDDFGVDYIELTSPCASEQSRADCEAICKLGLKAKILTHIRCHMDDARIAVETGVDGVDVVIGTSSYLREHSHGKDMTYIKNAAIEVIEFVKSKGIEIRFSSEDSFRSDLVDLLSIYSAVDKVGVNRVGIADTVGCASPRQVYELVRVLRGVVGCDIETHFHNDTGCAIANAFCALEAGATHIDTSVLGIGERNGITPLGGLMARMMVADREYVKSKYKLEKLKEIEDLVAEAVEVNIPFNNYITGFCAFTHKAGIHAKAILNNPSTYEIINPADFGMSRYVHFASRLTGWNAIKSRAQQLKLEMTDTQYKECTAKIKAMADIRPIAVDDADSIIRAYHRNLKSGENKPLLDLTAEEQAAFAAKEKELLEAQAAGLPV

SEQ ID NO: 7025 - DNA, 1257 bp, Schizosaccharomyces pombe
  CDS (1)..(1257)
atgtctgtgtccgaagctaatggtactgagaccatcaagcctcctatgaatggaaacccttatggtcccaacccatctgattttctttcacgtgtcaataacttttccattattgagtctactcttcgtgaaggtgagcaattcgcaaacgcttttttcgacaccgagaagaaaattcaaattgctaaggcattggacaactttggtgtcgattacattgaattgacttctcccgtggcttctgagcagtcccgccaagattgcgaagctatttgcaaattgggcttaaagtgtaaaattttaactcatattcgctgtcatatggatgacgctcgtgtcgctgttgagactggagttgatggtgttgatgttgttatcggaacttctcaatatcttcgcaaatattcccatggaaaggacatgacttacattattgacagcgctaccgaagttatcaactttgtcaagagcaagggtattgaagtccgcttttcatctgaggattctttccgttctgatcttgtcgatctcctttctctctacaaggctgtagacaagattggcgtcaaccgtgttggtattgctgacaccgttggttgcgctactcctcgccaagtctacgatcttattcgtaccttacgtggtgttgtctcttgtgatattgaatgtcattttcacaatgacactggtatggctattgctaatgcctattgcgcattggaagctggtgctacccatatcgatacttccattcttggtattggtgagcgtaatggtattactcctcttggtgccttgttggctcgtatgtatgtcaccgatagggaatacattacccacaaatacaagcttaaccagttacgtgagcttgaaaaccttgtcgctgatgccgttgaagttcaaattcctttcaacaattacattaccggaatgtgtgcttttacccataaggctggtatccatgctaaagctattctcgctaacccttctacatatgaaattcttaagcccgaggactttggcatgagtcgttatgttcatgttggctctcgtttgactggttggaatgccatcaaatctcgtgctgagcagcttaaccttcatcttactgatgcccaagccaaggaacttaccgttcgcatcaagaaattggctgatgtccgtactttagccatggatgatgttgatcgtgttctacgtgaataccatgctgacttgagtgatgctgatagaatcaccaaagaagcgtctgcttaa

SEQ ID NO: 7026 - protein, 418 aa, Schizosaccharomyces pombe
MSVSEANGTETIKPPMNGNPYGPNPSDFLSRVNNFSIIESTLREGEQFANAFFDTEKKIQIAKALDNFGVDYIELTSPVASEQSRQDCEAICKLGLKCKILTHIRCHMDDARVAVETGVDGVDVVIGTSQYLRKYSHGKDMTYIIDSATEVINFVKSKGIEVRFSSEDSFRSDLVDLLSLYKAVDKIGVNRVGIADTVGCATPRQVYDLIRTLRGVVSCDIECHFHNDTGMAIANAYCALEAGATHIDTSILGIGERNGITPLGALLARMYVTDREYITHKYKLNQLRELENLVADAVEVQIPFNNYITGMCAFTHKAGIHAKAILANPSTYEILKPEDFGMSRYVHVGSRLTGWNAIKSRAEQLNLHLTDAQAKELTVRIKKLADVRTLAMDDVDRVLREYHADLSDADRITKEASA

SEQ ID NO: 7027 - DNA, 1341 bp, Yarrowia lipolytica
  CDS (1)..(1341)
atgtgcgcaacagataacgcccccgccgctaacgctgctcctgagaagccctccaacgttggagtcgaggtcggtcacaccggcgagcagactaatccttacggagccaaccccgccgatttcctttctaacgtgtccaagttccagctcatcgagtccactctgcgagagggagagcagtttgcctctgccttctttgacaccgagaccaagatcgagattgccaaggctctggacgactttggtgtcgactacatcgagctgacctcccccgcagcatcggagcagtcgcggtccgattgcgaggccatctgcaagctcggtcttaaggccaagattctcactcacatccgatgccacatggacgacgcaagactcgctgtctccaccggtgtcgatggtgtcgatgtcgtcattggtacctcccagttcctgcgacagtactcccacggcaaggacatgaactacattgcacagtccgctgtcgaggtcattgagtttgtcaagagccacggcattgagatccgattctcctccgaggattctttccgatccgacctggtcgatctcctcaacatctaccgaactgtcgacaagattggtgtcaaccgagtcggtattgctgacactgttggatgcgccaacccccgacaggtctacgagcttgtccgaaccctcaagtccgttgtctcgtgcgacattgagtgccatttccacaacgacaccggctgtgccattgccaacgcctacaccgccctcgaggctggtgccaacctcatcgatgtctccgttctcggtatcggtgagcgaaacggtatcacctctctcggtggtctgatggctcgaatgattgctgctgaccgagactacgttctctccaagtacaagctgcacaagctgcgagacctcgagaacctcgtcgccgacgccgtccaggtcaacatccccttcaacaaccccatcaccggtttctgcgccttcacccacaaggccggtatccacgccaaggccattctcgccaacccctccacttacgagattctcaaccccgccgatttcggtctgacccgatacatccactttgccaaccgtcttaccggctggaacgccatcaagtcgcgagttgaccagctcaacctgcacctgaccgacgcccagtgcaaggatgtcactgccaagatcaagaagcttggtgacgttcgatctctcaacattgacgatgttgactccatcatccgagagttccacgccgatgtcaccagcactcccaccgttgctgccaccgagggacctgccgttgaggacgagcccgccgccaagaaggccaagactgaagagtaa

SEQ ID NO: 7028 - protein, 446 aa, Yarrowia lipolytica
MCATDNAPAANAAPEKPSNVGVEVGHTGEQTNPYGANPADFLSNVSKFQLIESTLREGEQFASAFFDTETKIEIAKALDDFGVDYIELTSPAASEQSRSDCEAICKLGLKAKILTHIRCHMDDARLAVSTGVDGVDVVIGTSQFLRQYSHGKDMNYIAQSAVEVIEFVKSHGIEIRFSSEDSFRSDLVDLLNIYRTVDKIGVNRVGIADTVGCANPRQVYELVRTLKSVVSCDIECHFHNDTGCAIANAYTALEAGANLIDVSVLGIGERNGITSLGGLMARMIAADRDYVLSKYKLHKLRDLENLVADAVQVNIPFNNPITGFCAFTHKAGIHAKAILANPSTYEILNPADFGLTRYIHFANRLTGWNAIKSRVDQLNLHLTDAQCKDVTAKIKKLGDVRSLNIDDVDSIIREFHADVTSTPTVAATEGPAVEDEPAAKKAKTEE

SEQ ID NO: 7029 - DNA, 1323 bp, Saccharomyces cerevisiae
  CDS (1)..(1323)
atgtctgaaaataacgaattccagagtgtcaccgaatcgacgactgctccaaccactagtaacccatatggcccaaatcctgcggattatctatccaatgttaagaatttccagttgattgattcaacactaagagagggtgaacaatttgccaacgcattcttcgatactgaaaaaaagattgaaattgctagagccttggatgatttcggtgtggactacatcgagttaacctctcccgtagcatccgaacaatcaagaaaggactgtgaagctatatgtaaactaggtttaaaggccaagatccttacacacattcgttgtcacatggacgatgccagagtcgccgtagagactggtgtcgacggtgtcgatgttgttatcggcacctccaaatttttaagacaatattcccacggtaaggatatgaactacatcgccaagagtgctgttgaagtcattgaatttgtcaaatccaaaggtattgaaatcagattttcctctgaagattccttcagaagtgatctcgttgatcttttgaacatttataaaaccgttgacaagatcggtgtaaatagagtcggtattgccgacacagttggatgtgccaacccaagacaagtatatgaactgatcagaactttgaagagtgttgtctcatgtgacatcgaatgccatttccacaatgataccggttgtgccattgcaaacgcctacactgctttggaaggtggtgccagattgattgacgtcagtgtactgggtattggtgaaagaaacggtatcactcctctaggtgggctcatggcaagaatgattgttgccgcaccagactatgtcagatctaaatacaagctgcacaagatcagagacatcgaaaacctggtcgctgatgctgtggaagttaacattccattcaacaaccctatcaccgggttctgtgcattcacacataaagcaggtatccatgccaaggccattttggctaacccatctacctacgaaatcttggaccctcacgatttcggtatgaagagatatatccacttcgccaacagactaactggttggaatgcaatcaaatcaagagtcgaccaattgaacttgaatttgacggatgatcaaatcaaggaagttactgctaagattaagaagctgggtgatgtcagaccgctaaatattgatgatgtagactccattatcaaggacttccatgcagaattgagcaccccacttttaaaaccagtaaataagggtacagatgacgacaatatcgatatttccaatgggcatgtttctaaaaaggcaaaggtcaccaaatag

SEQ ID NO: 7030 - protein, 440 aa, Saccharomyces cerevisiae
MSENNEFQSVTESTTAPTTSNPYGPNPADYLSNVKNFQLIDSTLREGEQFANAFFDTEKKIEIARALDDFGVDYIELTSPVASEQSRKDCEAICKLGLKAKILTHIRCHMDDARVAVETGVDGVDVVIGTSKFLRQYSHGKDMNYIAKSAVEVIEFVKSKGIEIRFSSEDSFRSDLVDLLNIYKTVDKIGVNRVGIADTVGCANPRQVYELIRTLKSVVSCDIECHFHNDTGCAIANAYTALEGGARLIDVSVLGIGERNGITPLGGLMARMIVAAPDYVRSKYKLHKIRDIENLVADAVEVNIPFNNPITGFCAFTHKAGIHAKAILANPSTYEILDPHDFGMKRYIHFANRLTGWNAIKSRVDQLNLNLTDDQIKEVTAKIKKLGDVRPLNIDDVDSIIKDFHAELSTPLLKPVNKGTDDDNIDISNGHVSKKAKVTK

SEQ ID NO: 7031 - DNA, 1221 bp, Methanococcus jannaschii
  CDS (25)..(1221): transl_table=11
atgacaaaagtgctggtgatgtttatggatttcttatttgagaacagctggaaagcagtttgtccctacaatccaaagttggatttaaaggacatttatatttatgacacaaccctaagagatggagagcaaaccccaggagtttgctttaccaaagaacaaaaattggagattgcaaggaagttggatgaacttggattaaagcagattgaagctggcttcccaatagtatctgaaagagaagcagatatagttaaaacaattgctaatgaagggctaaatgctgatatcttagctttatgcagggctttaaagaaagatatagataaagcaatagagtgcgatgtagatgggattattaccttcatagcaacatctcctctccacttaaaatataaattcaacaacaaaagcttagatgaaatattagagatgggagttgaggcagttgagtatgcaaaggaacatggcttatttgttgctttctctgcagaggatgcgacaagaacaccaatagaggacttgattaaagtgcataaagccgctgaagaggctggagcagatagggttcatatagcagacacaactggctgtgctaccccccaaagtatggagtttatatgtaaaacattgaaggagaacttaaaaaaggcacatattggagtgcattgtcacaacgactttggatttgcagttataaattcaatatatggtttaattggaggagctaaggcagtttcaacaacagttaatggtattggagagagggcagggaatgcagctttagaagagctaattatggctttaactgtcttgtatgatgttgatttgggattaaacttggaggttcttccagagttatgcagaatggttgaggaatactctggaataaagatgccaaagaacaaaccaatagttggagagcttgtatttgctcatgaaagtggaattcacgttgatgctgtcatagagaatccattaacctatgaacccttccttccagagaaaatagggcttaagagaaatattttgttagggaagcattctggatgcagagccgttgcctataagctaaaacttatgggaattgattacgatagagagatgttgtgcgagattgttaaaaaggttaaagagattagagaggaaggtaaatttataactgatgaagtctttaaggagattgttgaagaagttttaaggaagagaaataaaaattaa

SEQ ID NO: 7032 - protein, 398 aa, Methanococcus jannaschii
MDFLFENSWKAVCPYNPKLDLKDIYIYDTTLRDGEQTPGVCFTKEQKLEIARKLDELGLKQIEAGFPIVSEREADIVKTIANEGLNADILALCRALKKDIDKAIECDVDGIITFIATSPLHLKYKFNNKSLDEILEMGVEAVEYAKEHGLFVAFSAEDATRTPIEDLIKVHKAAEEAGADRVHIADTTGCATPQSMEFICKTLKENLKKAHIGVHCHNDFGFAVINSIYGLIGGAKAVSTTVNGIGERAGNAALEELIMALTVLYDVDLGLNLEVLPELCRMVEEYSGIKMPKNKPIVGELVFAHESGIHVDAVIENPLTYEPFLPEKIGLKRNILLGKHSGCRAVAYKLKLMGIDYDREMLCEIVKKVKEIREEGKFITDEVFKEIVEEVLRKRNKN

SEQ ID NO: 7033 - DNA, 1194 bp, Methanopyrus kandleri
  CDS (1)..(1194): transl_table=11
gtgcagagtccgtacgtacgtgaagccgttagggagatggacctcccggacgaggtgatcgtctacgacacgacgctgagggacggtgagcagaccccgggtgtcagcttcacgcccgagcagaagctggagatcgcgcacctactggacgagctgggcgtgcagcagatcgaggccgggttcccggtggtgtccgagggcgagcgggacgccgtgcgtaggatcgcgcacgagggactgaacgccgacattctatgcctggcgaggacgctacgtggtgacgtggacgcggcgttggactgcgacgtggacggagtgatcaccttcatcgccacctccgagctgcatctgaagcacaagctccggatgtcgagggaggaggtactcgagcggatcgccgacacggtcgagtacgcgaaggaccacgggctgtgggtggcgttctccgcggaggacgggacgaggacggagttcgagttcctggagagggtgtaccggacggcggaggagtgcggggcggaccgcgtccacgcgacggacaccgtcggcgtcatgataccggcggcgatgcggcttttcgtggcgaagatccgcgaggtcgtggacctgccgatcggcgtgcactgccacgacgacttcggcatggccgtggccaactcgctggccgcggtcgaggcgggggcgcaggcgatctccaccacggtgaacggtatcggtgagcgcgcgggtaacgcagccctcgaggaggtgatcatggccctcaaggagctgtacgggatcgacccggggttcaacaccgaggtgctcgcggagctctcgaggaaggtctcggagtactccggtatcgacgtgcccccgaacaaggccgtcgtgggcgagaacgccttcaggcacgagtccgggatccacgtggccgcggttctggaggagccgcgcacctacgagccgatcgaccccaaggaggtgggtatgaaccggaagatcgtcctcggtaagcacaccgggcggaaggcggtggtcgcgaagttggaggaactgggcgtggaaccggaggaggagatcgtcgaggaggtcctcaagcggatcaaggcgctcggggaccggcgtgtcagggtcaccgactccaagctcgaggagatcgtccggaatgtgctggaatcgagaggtgaccgagacgatccaggtagtcgatga

SEQ ID NO: 7034 - protein, 397 aa, Methanopyrus kandleri
MQSPYVREAVREMDLPDEVIVYDTTLRDGEQTPGVSFTPEQKLEIAHLLDELGVQQIEAGFPVVSEGERDAVRRIAHEGLNADILCLARTLRGDVDAALDCDVDGVITFIATSELHLKHKLRMSREEVLERIADTVEYAKDHGLWVAFSAEDGTRTEFEFLERVYRTAEECGADRVHATDTVGVMIPAAMRLFVAKIREVVDLPIGVHCHDDFGMAVANSLAAVEAGAQAISTTVNGIGERAGNAALEEVIMALKELYGIDPGFNTEVLAELSRKVSEYSGIDVPPNKAVVGENAFRHESGIHVAAVLEEPRTYEPIDPKEVGMNRKIVLGKHTGRKAVVAKLEELGVEPEEEIVEEVLKRIKALGDRRVRVTDSKLEEIVRNVLESRGDRDDPGSR

SEQ ID NO: 7035 - DNA, 1176 bp, Methanobacterium thermoautotrophicum
  CDS (1)..(1176): transl_table=11
ttgagatactttgttagccccttcaataaagaagctgaattaaaatttcctgacaggatcacgatttacgatacaacactgcgtgacggggagcagacccccggtgtatgccttggaacagaagaaaaacttgaaatagccagaaaacttgatgagctcggcatacatcagatagagagcggatttccggttgtatcagaacaggaaagagtttcagtgaagtccattgcaaatgagggcctcaatgcagagatactggcactctgcaggacaaagaaggatgacatcgacgcagcaatagactgtgatgtggatggagtcataaccttcatggcaacatcggacctccacctgaaacacaaactcaaactcacaagggaggaggccctcaacgtctgtatgaactccatagagtatgccaaggatcacgggcttttcctggcattttcagcagaggatgcaacaaggacagacctcgacttcctcaagcagatctaccggaaggccgagaactatggtgcagacagggtccacattgcagataccgtgggcgccataagcccccagggtatggactaccttgtcagggaactgcgcagggacatcaaggttgacatagcactccactgccacaacgactttggaatggccctatcgaactcaatagcagggctacttgcaggtgggactgcagtctcaaccacagttaacggtataggtgaaagggcgggcaacacatcccttgaggagctgatcatggccctgaggataatctatgaggttgacctcggattcaacataggcgtcctctatgaactttcaaggcttgtggagaaacacacaagaatgaaggtacctgagaacaagccgatagtcggcaggaacgtattcagacacgaatcaggtatacacgtcgacgcggtcatagaggagcccctaacctatgagccattccttccagagatgataggccaccagcgcaagatagtgctggggaaacactccgggtgccgtgcggtcaaggccaaacttgaggagtacggcatcgatgttacgagggatgaactctgcaggatagtggaggaggtaaagaaaaacagggagaagggtaagtacatcaacgatgaactcttctacaggattgtgaagtccgtaaggggacctgtagacttctag

SEQ ID NO: 7036 - protein, 391 aa, Methanobacterium thermoautotrophicum
MRYFVSPFNKEAELKFPDRITIYDTTLRDGEQTPGVCLGTEEKLEIARKLDELGIHQIESGFPVVSEQERVSVKSIANEGLNAEILALCRTKKDDIDAAIDCDVDGVITFMATSDLHLKHKLKLTREEALNVCMNSIEYAKDHGLFLAFSAEDATRTDLDFLKQIYRKAENYGADRVHIADTVGAISPQGMDYLVRELRRDIKVDIALHCHNDFGMALSNSIAGLLAGGTAVSTTVNGIGERAGNTSLEELIMALRIIYEVDLGFNIGVLYELSRLVEKHTRMKVPENKPIVGRNVFRHESGIHVDAVIEEPLTYEPFLPEMIGHQRKIVLGKHSGCRAVKAKLEEYGIDVTRDELCRIVEEVKKNREKGKYINDELFYRIVKSVRGPVDF

SEQ ID NO: 7037 - DNA, 1461 bp, Pyrococcus abyssi
  CDS (1)..(1461): transl_table=11
atgaggaaagtttacatctttgacacaacactaagggatggggagcaaactccgggagttagtttaaccgttgaagaaaaggttgagatagctaaacagctagctaagctcaacgtggatgttatagaggctggatttccaatagcgtctgagggagagttcaaggctgtaaagaaaatagcaacagaggtggaagatccaacaatagcagccctagctagagctgtggagaaggatatagacagggctggggaggctctaaggaatgcagaaaagaataggatacatacattcatagccacctcaccgatacacatgaaatataaactcagaaaggaacctgaggaagttaaaaagctagctgttaaagcggtagaacacgcaaccaagtatactgaggatgtagaattctcggccgaagatgcaacgagaagcgactgggatttcctagttgaggtttatgaggctgttatagacgctggagctaccgtgataaacgttcccgacaccgtaggttacgctacccctgaagagttttacgagttagtgagatatctaaggaggaacattagtaacatcaagggggttcaaataagcgttcactgtcacgatgacctcggcttagcagttgcaaactccctttcagcgattagagctggagcggatcaagttgaagtaacggttaacggaataggggagagagctggaaacgctgctctagaggaggttatcgtagctcttgacgttaggagggatttctacaaggttaaaacggatgtaaacttaaaagagatagccaggacaagtaagttagtttctcacttaaccggaatagaagtcccaccaaacaaggcgattgttggagggaatgcttttgcgcacgaatccggaattcatcaggatggtgtgctcaaagaaagaacgacttatgaaataatagaccctaagaaactaggattctccgggagtaagatagtgcttggaaagcactctggaaggcatgcatttaggaagaagcttgaagaactaggttacagcttaacagaagagcaccttgagagggctttcaagaagttcaaggatatcgccgataggaagaggtggataactgacacagacatagaggctataatccaggaggagcttacgaaatcgaatggaaagctcaaggttgagataatacacgtaacttcagggaaagtatcaaccgctacagtcaggattagtatgaacggagaggaaagaatagaggttgcttggtttaagaatggaccaatagatgctctattctcggcaatcaataaagcccttggagaggaattcaagcttagggagtacagggtatcttctgtaacatctggtaaagattctcttggagaagttctagttagagttgaagtaaatggggaaattttcgttggtaggggattaagtaccgatattatcgaggctagcgcttag

SEQ ID NO: 7038 - protein, 486 aa, Pyrococcus abyssi
MRKVYIFDTTLRDGEQTPGVSLTVEEKVEIAKQLAKLNVDVIEAGFPIASEGEFKAVKKIATEVEDPTIAALARAVEKDIDRAGEALRNAEKNRIHTFIATSPIHMKYKLRKEPEEVKKLAVKAVEHATKYTEDVEFSAEDATRSDWDFLVEVYEAVIDAGATVINVPDTVGYATPEEFYELVRYLRRNISNIKGVQISVHCHDDLGLAVANSLSAIRAGADQVEVTVNGIGERAGNAALEEVIVALDVRRDFYKVKTDVNLKEIARTSKLVSHLTGIEVPPNKAIVGGNAFAHESGIHQDGVLKERTTYEIIDPKKLGFSGSKIVLGKHSGRHAFRKKLEELGYSLTEEHLERAFKKFKDIADRKRWITDTDIEAIIQEELTKSNGKLKVEIIHVTSGKVSTATVRISMNGEERIEVAWFKNGPIDALFSAINKALGEEFKLREYRVSSVTSGKDSLGEVLVRVEVNGEIFVGRGLSTDIIEASA

SEQ ID NO: 7039 - DNA, 1194 bp, Thermoanaerobacter tengcongensis
  CDS (1)..(1194): transl_table=11
atgggggttaagagagttatagtttttgacactactttaagagatggtgaacagacgccaggggtaaattttaacagcagggataagcttgaaattgcctatcagctggcaaagcttggggtagacgtgatagaagcgggatttcctgcagcttccaatggggattttgaggcagtaaagaatattgctgactacgtaaaaggcgtaaccattgctgcgatgggaagagctgtgaaagaggacattgacagggccagcagtgctcttaaaaatgcagaaaagtccagattgcacgtctttatagctacttctgatatacaccttcagtacaagttgaagatgacaagagatgaggttctgaaaaaagcagttgaaatggtgaaatacgctagagggaagtttgatgagatagagttttcagcagaggatgcctcaaggactgattgggactttttagtgaaagtgtttagcgaagtaattgatgcaggagcccatattataaatgtgcctgatacggtaggttatgctatgccgagggagtatggagagcttataaggtatataagaaacaatgttccaaatattgatggagtaacaataagtgcgcattgccacaatgatttagggctggctgtagccaattctctttctgctatagaaaatggagcaactcaagtagaggttactgtgaacgggataggagagagggcaggaaatgcggctatggaagaggtgataatggctttaaataccagaaaagattattttggacttgtacacggcataaatacaaaagagatatacaatacgagcaaactagttagcgaactcacagggattaagttacagccaaataaagctatagtaggagctaatgctttcaggcaccagtccgggatacaccagcatggagtcataaacaatagattaacttatgaaataatgaggccagaggatataggagttgttcctgacactttcgctttaggtaaactttcaggaagaaacgcttttgaacttaaagtaaggcaactgggctacaacctttctcccggtgagataagtgaagcttttagaaagtttaaagatttagccgataggaaaaagaccatagtggaagaggatattcgatttgttgtagaggagactatagaagaatttaggggctttagggagggagaagcttgggcttaa

SEQ ID NO: 7040 - protein, 397 aa, Thermoanaerobacter tengcongensis
MGVKRVIVFDTTLRDGEQTPGVNFNSRDKLEIAYQLAKLGVDVIEAGFPAASNGDFEAVKNIADYVKGVTIAAMGRAVKEDIDRASSALKNAEKSRLHVFIATSDIHLQYKLKMTRDEVLKKAVEMVKYARGKFDEIEFSAEDASRTDWDFLVKVFSEVIDAGAHIINVPDTVGYAMPREYGELIRYIRNNVPNIDGVTISAHCHNDLGLAVANSLSAIENGATQVEVTVNGIGERAGNAAMEEVIMALNTRKDYFGLVHGINTKEIYNTSKLVSELTGIKLQPNKAIVGANAFRHQSGIHQHGVINNRLTYEIMRPEDIGVVPDTFALGKLSGRNAFELKVRQLGYNLSPGEISEAFRKFKDLADRKKTIVEEDIRFVVEETIEEFRGFREGEAWA

SEQ ID NO: 7041 - DNA, 1557 bp, Methanococcus jannaschii
  CDS (1)..(1557): transl_table=11
atgataatttatagggaagagaatgaaattataaaaaaggcacttgagaatttaaacattccagatagggtttatatctttgacacaacactcagagatggagagcaaactccaggtgtctctttaactccagaggagaaaatagacatagccataaaattagatgatttaggagttgatgttattgaggctggttttccagtatcatcattaggagagcaggaggctattaaaaaaatctgctcattaaacttagatgctgaaatctgcggattggcaagggctgtaaaaaaggatatagatgtagctatagattgcggagttgatagaatccatacatttatagcaacctctccattgcatagaaaatataaattaaaaaaatcaaaggaagagattattgatattgcagttgatgccatagagtacataaaagaacatgggattagagttgagttttcagcagaagatgcaacaagaacagagattgactatttaatagaagtttataaaaaggcagtagatgctggagcagatataatcaacgttccagataccgttggagttatgattccaagggctatgtattatctaataaatgagctaaagaaggaaataaaagtccctatatctgtgcattgccacaacgactttggtttagctgttgcaaactcattggcagcagttgaagcaggagcagagcaagtacattgtacaataaacggcttaggagagagaggaggaaatgcagcattggaagaggtagttatgagcttaatgtcaatctatggagttaaaactaatataaaaacacaaaaactttatgagatatctcagcttgtatcaaaatacactgaaattaaagtccaaccaaacaaggcaattgttggagagaacgctttcgctcatgaaagtggaatacatgcacatggagttttagctcatgctttaacctatgaacctatacccccagagttagttgggcagaagagaaaaataatcttaggtaagcacacaggaacacatgcaattgaggcaaagttaaaagaattaggaattgaggttggtaaggatataaataaagatcaatttgatgagatagttaagagaattaaagctcttggagataaaggaaagagagtcactgacagagatgttgaggcaatagttgaggatgttgttggtaagttggctaaaaaagatagagttgttgagttggagcaaatagcggttatgacaggtaatagagttattccaactgcatcagttgctttaaagattgaagaagagattaagaagagctcagctattggtgttggaccagtagatgcggcagttaaggcaatacaaaaagccattggagagaagattaaacttaaagagtatcatataaatgccataactggaggaactgatgcattggcggaggttattgtaaccttagaaggatatggaagggagataacaacaaaggcagcaagtgaagatatagttagggcttcagttgaggcagttatagatggaatcaacaaaatcttggcaaaaagagaaaaatga

SEQ ID NO: 7042 - protein, 518 aa, Methanococcus jannaschii
MIIYREENEIIKKALENLNIPDRVYIFDTTLRDGEQTPGVSLTPEEKIDIAIKLDDLGVDVIEAGFPVSSLGEQEAIKKICSLNLDAEICGLARAVKKDIDVAIDCGVDRIHTFIATSPLHRKYKLKKSKEEIIDIAVDAIEYIKEHGIRVEFSAEDATRTEIDYLIEVYKKAVDAGADIINVPDTVGVMIPRAMYYLINELKKEIKVPISVHCHNDFGLAVANSLAAVEAGAEQVHCTINGLGERGGNAALEEVVMSLMSIYGVKTNIKTQKLYEISQLVSKYTEIKVQPNKAIVGENAFAHESGIHAHGVLAHALTYEPIPPELVGQKRKIILGKHTGTHAIEAKLKELGIEVGKDINKDQFDEIVKRIKALGDKGKRVTDRDVEAIVEDVVGKLAKKDRVVELEQIAVMTGNRVIPTASVALKIEEEIKKSSAIGVGPVDAAVKAIQKAIGEKIKLKEYHINAITGGTDALAEVIVTLEGYGREITTKAASEDIVRASVEAVIDGINKILAKREK

SEQ ID NO: 7043 - DNA, 1086 bp, Pyrococcus abyssi
  CDS (1)..(1086): transl_table=11
atggtgctagactcaactttgagagaaggagagcaaactccaggagttaattacaccccagaacagagacttgaaatagcaatagccctagatgaggttggagttgacttcatagagattggacatccagcggttagcgaagatgtattcagagggatgaaattaatagcggagcaggggttaaatgttgagttactagctcattcaagagcgctaatagaggacattgattatgttctaaagactggagtcgattgggtgggaatattcttctgtctatcggaggcttgccttaggaagaggttcagaataacgttagaccatgcccttgaaaagatatctagggccattgagtacgcaaaagaccatggacttaaggttcgctttacacccgaagacaccactaggactgaatgggcgaacttgaagagggctataaggcttgcaaaggagttaaaagttgataggataagcgttgctgacaccactggaagcacgcatccgctgaggttctacactctcgtcaagaaaattgtcaactttggaatacccgttaacgttcactgtcacaacgatctcgggttagcactagcaaatgcgattatgggaatagaggctggagcaactctcgtggatgctaccgttaacggtcttggggagagggctggaatagttgacttggctcaaataataacggtgctctactatcactatggaatcaaaaagtacaggctggatctcctctacagggtaagcaacctagttagcgagataactggaatatcgccccaacctaactatccaatagttggtgagaacgcattcacgcataaggctggtttgcacgtttcagcggtgcttaaggatccaaggttctacgagttcttgcccgctgaggttttcggaagggagagaacgatatacgtcgataggtacgccggtaaggatacgataaggtactacctcgagaaattcggaataagagatcatggaattgtgacatctcttcttaggaaggttaagagcagcagagaacctttcacctgggaaaagttgttagaagaggctaggagggttaaagaatga

SEQ ID NO: 7044 - protein, 361 aa, Pyrococcus abyssi
MVLDSTLREGEQTPGVNYTPEQRLEIAIALDEVGVDFIEIGHPAVSEDVFRGMKLIAEQGLNVELLAHSRALIEDIDYVLKTGVDWVGIFFCLSEACLRKRFRITLDHALEKISRAIEYAKDHGLKVRFTPEDTTRTEWANLKRAIRLAKELKVDRISVADTTGSTHPLRFYTLVKKIVNFGIPVNVHCHNDLGLALANAIMGIEAGATLVDATVNGLGERAGIVDLAQIITVLYYHYGIKKYRLDLLYRVSNLVSEITGISPQPNYPIVGENAFTHKAGLHVSAVLKDPRFYEFLPAEVFGRERTIYVDRYAGKDTIRYYLEKFGIRDHGIVTSLLRKVKSSREPFTWEKLLEEARRVKE

SEQ ID NO: 7045 - DNA, 1383 bp, Sulfolobus tokodaii
  CDS (1)..(1383): transl_table=11
atgaaagtaggaatccttgactcaaccctaagagaaggagaacaaacacccggagttgtattcacaatagatcaaagagtcgaaatagcaaaagcattatcagatgttggtgttcagatgatagaagcaggacatcctgcggtatcctcggatatttatgagggaataaaaaggattatgaaacttaaaagagaaggacttattacatcagaaatagtagggcatagtagggctgtaaaaaaagatatcgaagtagcagcagaattagaagtagatagaatagcaatattttatggtgtaagtgatatccaccttaaagcaaaacatcatgttacaagagaggaggcacttaatataatagcagaaacaataagttatgcaaaaagtcatggtgttaaagtaagatttacagcagaagacggtagcagaaccgatttagattatttaataaaagtgtgtaaaacagcaagagatgctggtgctgacagagtaagtatagccgatactgtgggtattctttatcccacaaaaacaagagaattatttagtaccttagtaagggaagtaccaggtttagaatttgatattcatgctcataatgatttaggtttagccgttgctaatgcgttggcagcaatagaaggcggagctactataattcatactacagtaaatggattaggagaaagagtaggaattgttcctctccaagtaattgcggcagcaataaaatatcattttggaattgaagttgtaaagttaaataaattacaacaattagccagtctagttgaaaaatatagtggtataccgatgcctccaaactatccaataacaggagattatgcatttattcataaagctggtattcatgtggctggagttcttaatgatccatcaacttacgagtttatgccaccagagacttttggaagaagtagagactacgttattgataaatatactggtaagcacgcactaaaagataggtttgaaaaattgggcgttaaattaagtgatgtagaactagatcaagtactagctaaaataaaatccaatccaaatgttagattctatagagatgtagacttattagaaatagctgagtcagttactggcagagtattaaaacctaaaccgccagaaaatattgaagctttaatttcagttaaatgtgagtcaaatgtttatactacagcagtaactagaagattatctgttattccaggagtaaaagaagtcatggaaatctctggagattatgatattctcgttaaagttgaggcaaaagatcctaatgaacttaatcaaattattgaaaatatcagagctgtaaagggtgtaagctctactttaacatcattagttcttaaaaagatgtaa

SEQ ID NO: 7046 - protein, 460 aa, Sulfolobus tokodaii
MKVGILDSTLREGEQTPGVVFTIDQRVEIAKALSDVGVQMIEAGHPAVSSDIYEGIKRIMKLKREGLITSEIVGHSRAVKKDIEVAAELEVDRIAIFYGVSDIHLKAKHHVTREEALNIIAETISYAKSHGVKVRFTAEDGSRTDLDYLIKVCKTARDAGADRVSIADTVGILYPTKTRELFSTLVREVPGLEFDIHAHNDLGLAVANALAAIEGGATIIHTTVNGLGERVGIVPLQVIAAAIKYHFGIEVVKLNKLQQLASLVEKYSGIPMPPNYPITGDYAFIHKAGIHVAGVLNDPSTYEFMPPETFGRSRDYVIDKYTGKHALKDRFEKLGVKLSDVELDQVLAKIKSNPNVRFYRDVDLLEIAESVTGRVLKPKPPENIEALISVKCESNVYTTAVTRRLSVIPGVKEVMEISGDYDILVKVEAKDPNELNQIIENIRAVKGVSSTLTSLVLKKM

SEQ ID NO: 7047 - DNA, 1155 bp, Thermoanaerobacter tengcongensis
  CDS (1)..(1155): transl_table=11
atggctttcaaaaaagacaaacctgtttacattgttgacactactttaagggatggtgagcaaactgcaggtgttgtatttgcaaataacgaaaaaatcagaattgcgcaaatgttagatgagattggcatagaccagctggaagttggcatccccacaatgggaggagatgaaaaggagacggtagctaaaattgcaaaattaggattgaaggctagtataatggcatggaacagagcggttgtaaaagatgttcaggaatctcttgagtgcggtgtagatgcagtggccatttctatttctacatcagacattcacatagagcacaagttgaaaaagacaaggcaatgggtattggacagcatgacagaagcggtgagatttgctaaaaaagaaggcgtttatgtttctgttaacgcggaggatgcctccaggactgatatgaattttttgattgagtttgcaaggtgtgcaaaacaagcaggggcagatagattgagattttgcgacactgtaggttttttggatcctttcaaaacctatgagatggtaaaagccattaaagatgcagtagatattgagattgaaatgcatacccataatgattttggtatggctacggcaaacgctcttgcaggagttaaggctggggctaaatttgtgggggttacagttaatggactaggagagagagctggcaatgcggctttagaagaggtagtcatggcgttaaagtacgtgtacaaaatggatttaggtattgacaccagccgctttagagagatatccgagtatgtagctttagcatcaggtagaccacttcctccttctaaggctattgtaggtaaaaacgtgtttgcccatgagtcaggaattcacgtggatggagctcttaagaatccgtatacttatgaagtgtttgaccctcaagaagtaggacttgagaggcagatagtgataggaaagcattctggcactgcggctttaataaacaagtttaaagagtacgggagagttttaactgaagaggaggctaatttgctgctccctcatgttaggaagatggccattcaattaaagaggcctttatttgataaggagctaatgtacctttatgaagatgtgattgtgaaaggaaaagctaaagcaatctaa

SEQ ID NO: 7048 - protein, 384 aa, Thermoanaerobacter tengcongensis
MAFKKDKPVYIVDTTLRDGEQTAGVVFANNEKIRIAQMLDEIGIDQLEVGIPTMGGDEKETVAKIAKLGLKASIMAWNRAVVKDVQESLECGVDAVAISISTSDIHIEHKLKKTRQWVLDSMTEAVRFAKKEGVYVSVNAEDASRTDMNFLIEFARCAKQAGADRLRFCDTVGFLDPFKTYEMVKAIKDAVDIEIEMHTHNDFGMATANALAGVKAGAKFVGVTVNGLGERAGNAALEEVVMALKYVYKMDLGIDTSRFREISEYVALASGRPLPPSKAIVGKNVFAHESGIHVDGALKNPYTYEVFDPQEVGLERQIVIGKHSGTAALINKFKEYGRVLTEEEANLLLPHVRKMAIQLKRPLFDKELMYLYEDVIVKGKAKAI

SEQ ID NO: 7049 - DNA, 1770 bp, Solanum pennellii
  CDS (1)..(1770)
atgttcttcttcctccaacttctagtaccaataatttcagtttttcaatcaaaaaaacactactactccacatttatccggtgttcgatttcgaatcgtcgaccggaatatgtacccagtaaaatctccgacccgaaatacgttcgcatattcgatactactcttcgtgacggtgagcaatctccaggtgctacaatgactacgaaagagaaactcgacgtcgctcgtcagctagcgaaactcggtgtcgatataattgaagctggattcccagcttcatctgaagcagatttcgaatctgtgaaattaattgcagaggaaattggtaataatactgatgaaaatggatttgttcctgtaatttgtgggttatctagatgtaataaaagtgatattgataaagcttgggaagcagtgaaatatgctaaaaaacctagggttcatacgtttattgctacgagtgaaatacatatgaagtataaattgaagatgagtagagaacaagtggtggaaaaagcaaggagtatggtagcttatgctagaagccttggatgtgaagatgttgaatttagtccagaagatgcaggaaggtctgatcgagagttcctttatgatatcctcggagaagttattaaagctggtgcaacaacacttaacatacctgatactgttggatacactgttccaagtgaatttggacaattaattactgacataaaagccaatactccggggattgaaaatgtgataatttcaacacattgccagaacgatcttgggctttctactgccaacactttagctggagcttgtgcaggagcaagacaactagaggtgaccattaatggcattggtgaaagagctggaaatgcttctctggaggaggttgtaatggccttaaaatgtcgcggagagcaagtattaggtggcctctacacggggattaacactcaacatattgttccatcgagcaaaatggtggaggagtacagtgggctacaggtgcagccacataaggccattgttggagctaatgcatttgctcatgaaagtggcatccatcaggatggaatgttaaaacacaaggacacctatgagattatatctcctgatgatgttgggcttagtcgttctaatgaagcgggtattgtccttgggaaactcagtggtcgccatgcactgaaatccaaaatgcttgagcttggatatgacattgatggaaaagaactagaggacctcttttggcgttttaagtcagtagctgagaagaaaaagaaaattacagatgatgacttaatagcactgatgtcagatgaagttctccaacctaatgtttattggaagcttggagatgtacagattatgtgtggaagtcttggcctctctacagcaactgtgaagcttataaacactgatggtcaagagcatattgcttgttcagttggaacaggacctgttgatgcagcttacaaggcagtggacctcattgtgaaggtgcctattacgctccttgaatattccatgaatgcagtcacagaaggtatagatgccatagcatcaaccagagtgtcaatctgcagtattgataggcatactataatgaatggttcaactggacagactattcaccgcacatttagtggaaccggagcagatatggatgttgttatctctagtgtccgagcgtatattggtgcattgaacaaaatgttgagttacgaaaagctggtgtcaagatacagcaaacctgaagacagtgtggtggtataa

SEQ ID NO: 7050 - protein, 589 aa, Solanum pennellii
MFFFLQLLVPIISVFQSKKHYYSTFIRCSISNRRPEYVPSKISDPKYVRIFDTTLRDGEQSPGATMTTKEKLDVARQLAKLGVDIIEAGFPASSEADFESVKLIAEEIGNNTDENGFVPVICGLSRCNKSDIDKAWEAVKYAKKPRVHTFIATSEIHMKYKLKMSREQVVEKARSMVAYARSLGCEDVEFSPEDAGRSDREFLYDILGEVIKAGATTLNIPDTVGYTVPSEFGQLITDIKANTPGIENVIISTHCQNDLGLSTANTLAGACAGARQLEVTINGIGERAGNASLEEVVMALKCRGEQVLGGLYTGINTQHIVPSSKMVEEYSGLQVQPHKAIVGANAFAHESGIHQDGMLKHKDTYEIISPDDVGLSRSNEAGIVLGKLSGRHALKSKMLELGYDIDGKELEDLFWRFKSVAEKKKKITDDDLIALMSDEVLQPNVYWKLGDVQIMCGSLGLSTATVKLINTDGQEHIACSVGTGPVDAAYKAVDLIVKVPITLLEYSMNAVTEGIDAIASTRVSICSIDRHTIMNGSTGQTIHRTFSGTGADMDVVISSVRAYIGALNKMLSYEKLVSRYSKPEDSVVV

SEQ ID NO: 7051 - DNA, 1839 bp, Solanum pennellii
  CDS (1)..(1839)
atggcgtctatcaccgcaaatcatccaatctccggtaaaccattaatctcattccgtcccaaaaaccctttacttcaaacccaaactctcttcaatttcaaaccatcaatctccaagcactccaattcttcattttccattcccgttgtccgctgctcaatccgccgtataccggaatatactccgagtcacattcccgatccaaactacgtccggatattcgacaccactctccgtgatggcgaacaatcaccaggggctacaatgactacaaaggagaaactggatgttgcgcgtcagtcagctaagcttggtgttgatataattgaggctggttttcctgcttcttctgaagctgatcttgaagctgtgaaattgatagctaaggaagttgggaatggtgtttatgaagaggaatacgttccggttatttgtggattggcgaggtgtaataagaaggatattgataaggcgtgggaggctgtgaagtatgctaagaaaccgaggattcatacgtttattgctacaagtgaggtacatatgaattataagctgaaaatgagtagagatcaagttgttgagaaagctaggagtatggtggcttatgcaaggagtattgggtgtgaggatgttgaatttagccctgaagatgctggaagatctgatccggagtttctttatcatatcttgggagaggttatcaaagctggggcaacaacccttaacatccctgatactgttggatacactgtacccgaagaatttggacaattgattgctaaaataaaagcgaataccccaggagttgaagatgtgatcatttcaacacactgccagaacgatcttgggctttctactgccaacaccttagctggagcatgtgcaggtgcaagacaattggaagtgaccatcaatggaattggtgaaagagctggaaatgcttctttagaggaggttgtaatggccttaaagtgtcgtggagagcaagtactaggtggcctatatacagggattaatacacaacatatactcatgtcaagcaagatggtagagggtatttcgggacttcatgtgcaaccacacaaggccattgttggagctaatgcttttgttcatgaaagtggcatccatcaggatggaatgttaaaacacaaagatacatatgagattatatctcctgaagatattgggcttaatcgtgctaatgaatctggtattgtcttcgggaaactcagtggggtcatgctttgcaagccaaaaatgcttgagcttggatacgagattgagggaaaagaacttgatgacctgttctggcgattcaaatctgtggctgagaagaaaaagaaaattacagatgatgacctggtagcactgatgtcagatgaagttttccagcctcaatttgtgtggcaacttcaaaatgtacaggttacttgtggaagtcttggcctttctacagcaaccgttaagcttattgatgctgatggtcgagagcatatttcttgttctgttggaacggggccagttgacgcggcttataaggcagttgatctcattgttaaggttcctgtaacactccttgagtattccatgaatgcagtcacacaaggtatagatgctatagcttcaaccagagtcttgattcgtggagaaaatggccatacatcaacccatgccttaactggagagactgttcaccgtacatttagtggaaccggagcagatatggatattgtcatctccagtgtccgagcctatgttggtgcattgaataagatgatgagtttcagaaaattaatggcgaaaaataacaaacccgaaagcagtgcagtcatatag

SEQ ID NO: 7052 - protein, 612 aa, Solanum pennellii
MASITANHPISGKPLISFRPKNPLLQTQTLFNFKPSISKHSNSSFSIPVVRCSIRRIPEYTPSHIPDPNYVRIFDTTLRDGEQSPGATMTTKEKLDVARQSAKLGVDIIEAGFPASSEADLEAVKLIAKEVGNGVYEEEYVPVICGLARCNKKDIDKAWEAVKYAKKPRIHTFIATSEVHMNYKLKMSRDQVVEKARSMVAYARSIGCEDVEFSPEDAGRSDPEFLYHILGEVIKAGATTLNIPDTVGYTVPEEFGQLIAKIKANTPGVEDVIISTHCQNDLGLSTANTLAGACAGARQLEVTINGIGERAGNASLEEVVMALKCRGEQVLGGLYTGINTQHILMSSKMVEGISGLHVQPHKAIVGANAFVHESGIHQDGMLKHKDTYEIISPEDIGLNRANESGIVFGKLSGVMLCKPKMLELGYEIEGKELDDLFWRFKSVAEKKKKITDDDLVALMSDEVFQPQFVWQLQNVQVTCGSLGLSTATVKLIDADGREHISCSVGTGPVDAAYKAVDLIVKVPVTLLEYSMNAVTQGIDAIASTRVLIRGENGHTSTHALTGETVHRTFSGTGADMDIVISSVRAYVGALNKMMSFRKLMAKNNKPESSAVI

SEQ ID NO: 7053 - DNA, 1521 bp, Bacillus anthracis
  CDS (1)..(1521): transl_table=11
atgaagcaaattttgttcatggatacgacgctacgtgatggcgaacaatcaccaggagtaaatttaaatgaacaagagaaattgcaaattgcaaggcaattagagagactagggattcatgtcatggaagctggctttgcagcagcttccgaaggggattttcaatcggtaaagcgcatcgcaaatacaattcaaaatgctacagttatgagtttagcaagagcgaaagaaagtgatattcgaagagcatatgaagctgtgaaaggtgcggtatctcctcgtttacacgtatttttagctacgagtgatattcatatgaagtataaactttgtatgtcaaaagaagatgtattagatagtatttatcgatcggttacacttgggaaatcgttatttccgacagtacaattttcagcagaagatgcaacaagaacagcaagagattttttagctgaagcggtagaagttgcgattcgtgcaggagcgaatgtaattaatattccagatacagttgggtatacgaatccagaagaatattatgctctttttaaatatttacaagaatccgttccttcatatgaaaaagcaattttctcttgtcattgtcatgatgatcttgggatggcggtagcaaattcattagctgcagttgaaggcggagcgttgcaagtagaaggaacaattaatgggattggagaaagagcagggaatgcggcgttagaagaggttgcagttgctcttcatattaggaaagatttctataaagcagagccttctatgacgctaaaagaaattaaagcgacaagtacattagtaagcagattaacgggtatggttgtatcgaaaaataaagcgattgttggagcaaatgcattcgctcatgaatcaggcattcatcaagatggtgtattaaaagaagtgacaacatatgaaattattgaaccagcgctagtaggcgaatctcaaaatctatttgtacttggaaaacattctgggcgtcacgcgtttacagaaaaaatgaaagaacttggctatgaatttacaaacgacgagcgggatgcagtatttgaagcatttaaaaaattagctgatcgtaagaaggaaattactgaggaagatttacgagcacttatgcttggtgaagcagcatttgcggctcagcaatataacattacgcaattgcaagtacatttcgtatcaaatagtacacaatgtgcgacagttgtactaaaagatgaggaaggaaatgtattcgaagatgcagctactggctctggtagtattgaagcgatttataatgcaatccaaagaattttaggattggaatgtgaattggcggattatcgcatacaatctattacacaaggtcaagatgcactggctcatgttcatgttgaattaaaagaaggagcacatcaagtatcaggttttggtgttgcacaagacgtattggaagcgtcggcaagagcatatgtccacgcagcggggaaattgaaatcttttatccagcttgtgaaataa

SEQ ID NO: 7054 - protein, 506 aa, Bacillus anthracis
MKQILFMDTTLRDGEQSPGVNLNEQEKLQIARQLERLGIHVMEAGFAAASEGDFQSVKRIANTIQNATVMSLARAKESDIRRAYEAVKGAVSPRLHVFLATSDIHMKYKLCMSKEDVLDSIYRSVTLGKSLFPTVQFSAEDATRTARDFLAEAVEVAIRAGANVINIPDTVGYTNPEEYYALFKYLQESVPSYEKAIFSCHCHDDLGMAVANSLAAVEGGALQVEGTINGIGERAGNAALEEVAVALHIRKDFYKAEPSMTLKEIKATSTLVSRLTGMVVSKNKAIVGANAFAHESGIHQDGVLKEVTTYEIIEPALVGESQNLFVLGKHSGRHAFTEKMKELGYEFTNDERDAVFEAFKKLADRKKEITEEDLRALMLGEAAFAAQQYNITQLQVHFVSNSTQCATVVLKDEEGNVFEDAATGSGSIEAIYNAIQRILGLECELADYRIQSITQGQDALAHVHVELKEGAHQVSGFGVAQDVLEASARAYVHAAGKLKSFIQLVK

SEQ ID NO: 7055 - DNA, 1548 bp, Bacillus halodurans
  CDS (1)..(1548): transl_table=11
gtgcgaaaaattagcgtcttcgatacgacgttgcgtgacggtgagcagtcagccggagtgaacctcaactttgaggaaaagatggaaatcgcaaaacagttagagcgtctcggtgtggatattattgaggctggttttccagcctcttcccaaggggattttcaatcggttaaagcgattgcggagaccgtaaaaggaagctccgttactgggctggcccgctctgtgcaaaaagatatcgacgcagcgtgggaggcgttaaaatcggctgaggagccacggattcatctctttattgctacttctcccattcatatggaacataaattacgaatgactccagaacaagtgattgaaaaggctgttgagtctgtgaagtatgcagccagtcgtttcaagcatgttcaatggtcagctgaggatgcgagccgctcggactttccgtttttagcgcaaatcattgaagcggtgatccaagcgggagcaaccgttattaatttacctgacaccgttggatatacgacgccgcaagagattaagcgaatgtttcaatatatgaagcaaaacgttccaagcatcgacaaagtcagcttgtctactcataaccatgacgaccttggaatggcagttgctaactcattagcagcgattcagggcggggccgatcaagtggaatgcacgattaatggcattggggaaagagccggtaatgcctctcttgaagagattgccgtcgcccttaatattcgtaaagatcattatgaaacagaaactggacttattttaaaagaaattaaacgtacgagtagccttgtaagcaaattaacgggcatggttgtaccgaacaataaagcggtcgtaggagcgaatgcatttgctcatgaatcgggcatccaccaagatggcgttctaaaaaataaacaaacatatgaaattattacacctgagatggtcggtgtgtcatccaattcgatggtgcttggaaaacattcagggcgccatgcgttcaaaacgaaagttcaggaacttggatttacaggaacagatgagcagctaaacaacatttttaaagcatttaaagacctagcagataaaaagaaagaaattaccgaagacgatctatttgctttaatgaccgaacagaccgttggaggagaaacgaaccattacgaattgcaaactcttcaagtgaattacgggtccaacctgacgaatacggcaacgatcacgatgaagttaccatcaggggaagtggcggaagaggcggccactgggtctggaagtgttgaggcgatttacaatacacttgagcgcctgctcgatgccccggtgaaattgttagattatcgaattcagtccattactggcggtagggatgctctggcagatgtctatgttcaaatggattatcaaggagtcgtctcaagtggacgcggcacggcccatgatgtgttagaagcgtcagcaaaagcctatttaaacgcagttaatcgaacgattaatcgaaagaaatatgcagaagtttatggatcgaaggtggaggtgtag

SEQ ID NO: 7056 - protein, 515 aa, Bacillus halodurans
MRKISVFDTTLRDGEQSAGVNLNFEEKMEIAKQLERLGVDIIEAGFPASSQGDFQSVKAIAETVKGSSVTGLARSVQKDIDAAWEALKSAEEPRIHLFIATSPIHMEHKLRMTPEQVIEKAVESVKYAASRFKHVQWSAEDASRSDFPFLAQIIEAVIQAGATVINLPDTVGYTTPQEIKRMFQYMKQNVPSIDKVSLSTHNHDDLGMAVANSLAAIQGGADQVECTINGIGERAGNASLEEIAVALNIRKDHYETETGLILKEIKRTSSLVSKLTGMVVPNNKAVVGANAFAHESGIHQDGVLKNKQTYEIITPEMVGVSSNSMVLGKHSGRHAFKTKVQELGFTGTDEQLNNIFKAFKDLADKKKEITEDDLFALMTEQTVGGETNHYELQTLQVNYGSNLTNTATITMKLPSGEVAEEAATGSGSVEAIYNTLERLLDAPVKLLDYRIQSITGGRDALADVYVQMDYQGVVSSGRGTAHDVLEASAKAYLNAVNRTINRKKYAEVYGSKVEV

SEQ ID NO: 7057 - DNA, 1560 bp, Blochmannia floridanus
  CDS (1)..(1560): transl_table=11
atgcatcaacaagtgattatttttgatacaactttacgagatggagaacaatccttacaaactagcttaagtgtaaaagaaaaactccaaatagctttcgctttagaaaaattaggagtagatgttatggaagtaggatttccaatatcttctccaggagattttgaatcagtacacacaatagctcaaaatatacaaaatagctgtgtatgtggattagctcgatgtctagaaaaagatattgatattgcagccgaagctttaaaatctgcaaaaaaatttcgcattcatatatttttaccaacatctgctatacatattcaatctaaattgagaaaaaatttcgatcaaattatagatatgactacccattcaattcgttatgcaagaaaatatactgatgatgtagaattttcctgtgaagatgctgggcgtacatcaattgataacttatgccgtattgtcgaaatcgctattaaatcaggagcacgtactatcaatataccagacacagttggttatactatccccaatcaatttagtgaaattatttattctttatataaaaaagtcccgattattgaccaagctattatctccgtccattgtcatgatgatttaggaatggcagtaggtaattcgatttctgcaatacaagctggagctcgccaaatagaaggtactatcaatggtatcggagaacgagcaggaaacacagctctagaagaaataattatggctatcaaaatacgacatgatctattacacgtatatactaatattcaccaccatgaaatttatcaaaccagccaagtagtaagtcaactatgcaacatgcctattccagcaaacaaagcaatagttggatcaaatgcattttctcactcttcaggtattcatcaagatggagtattaaaaaataaaaaaaattatgaaataatgaatcccaaaaacatcggattaaaaaaagttcaacttaatttaacatcacgatcaggaagagcagctgttaaatatcacatggaaaaaatgggataccaagaacatgattacaatatagatgaactatataaagtttttctaaaattagctgatcaaaaaggaagagtattcaattatgaactagaagcgttagcttttacaaagtactctcaagaatacttagaatattttgcattagaatctttccacattcattctacttcatcagcattatctaatgctataattaatttatattgcgggaaagaaaaaaaaatacatagctgttcaacaacaggtagaggcccaatagatgcagcatataaagcattaacactaatctctaaattacctataaaattagaaaaatatcaacttcattccaaaaaatacgaatacaatatattaggacaagtaaatattattgtatcataccaaggacgtcattttcatggcattggatcaaatatagatattattaaagcatcgattatagcaatgattcaagcgttaaataatatttggcaaactaaacaaataacgataaatcataaaaatacccagcatataaaaaaatag

SEQ ID NO: 7058 - protein, 519 aa, Blochmannia floridanus
MHQQVIIFDTTLRDGEQSLQTSLSVKEKLQIAFALEKLGVDVMEVGFPISSPGDFESVHTIAQNIQNSCVCGLARCLEKDIDIAAEALKSAKKFRIHIFLPTSAIHIQSKLRKNFDQIIDMTTHSIRYARKYTDDVEFSCEDAGRTSIDNLCRIVEIAIKSGARTINIPDTVGYTIPNQFSEIIYSLYKKVPIIDQAIISVHCHDDLGMAVGNSISAIQAGARQIEGTINGIGERAGNTALEEIIMAIKIRHDLLHVYTNIHHHEIYQTSQVVSQLCNMPIPANKAIVGSNAFSHSSGIHQDGVLKNKKNYEIMNPKNIGLKKVQLNLTSRSGRAAVKYHMEKMGYQEHDYNIDELYKVFLKLADQKGRVFNYELEALAFTKYSQEYLEYFALESFHIHSTSSALSNAIINLYCGKEKKIHSCSTTGRGPIDAAYKALTLISKLPIKLEKYQLHSKKYEYNILGQVNIIVSYQGRHFHGIGSNIDIIKASIIAMIQALNNIWQTKQITINHKNTQHIKK

SEQ ID NO: 7059 - DNA, 1563 bp, Bradyrhizobium japonicum
  CDS (1)..(1563): transl_table=11
atggcccccgtgaacaagtccgacaaggaccgcgtcatcattttcgacaccacgctgcgcgacggcgagcagtgccccggcgccaccatgaccttcgaggagaagctcgaggtcgccgagctcttggatgatatgggcgtcgacgtcatcgaggccggcttcccgatcacctccgagggcgacttccaggcggtcagcgagatcgcccgccgctccaagaacgccgtcatcgccggcctgtcccgcgcccatcccgccgacatcgaccgctgcgcggaggctgtgaaattcgcaaagcgcggccgcgtccacaccgtgatcgcgacctcgccgctgcacatgcgggtgaagctgaacaagaccccagagcaggtgatcgagacttcggtcgcgatggtcgcgcgtgcccgcaaccagatcgacgatgtcgaatggtcggccgaggacggcacccgcagcgagatggactatctgtgccgcatcgtcgaggccgtcatcaaggccggcgcgaccacggtgaacatccccgacaccgtcggctacacggtgccggaggaatacacccacttcatgaagacgctgatcgagcgcgtgccgaactcggataaggcggtgttctcggtccattgccataacgatctcggcatggccgttgccaattcgctggccggggtcgtcggcggtgcgcgccaggtcgagtgcaccatcaacggcatcggcgagcgcgccggcaacgccgcgctcgaagagatcgtgatggcgatcaacgtgcgcaacgacaaattcccctactggaacaagatcgacaccacgcagctcacccgcgcctcgaaggtggtgtcggcggcgacctcgtttccggtgcagtacaacaaggccatcgtcggccggaacgccttcgcgcatgagagcggcatccatcaggacggcgtgctgaaggacgcctccacctacgagatcatgcggccggaaatggtcggcctgaagcagtcctcgctggtgctcggcaagcactccggccgccatgccttcgtgcacaaactggaggagatgggctacaagctcggtccgaaccagctggaagatgcgttcacgcggatgaaggcgctcgccgaccgcaagaaggacatctacgacgaggacatcgaggcgctggtcgacgaggagatggcggcctcccacgaccgcatcaagctgacctcgctgaccgtgatcgccggcacccatggcccgcagcgcgcgaccatgaagctcgacgtcgacggccagatcaagatcgaggaggccgagggcaatggtccggtggacgcggtgttcaactgcatcaagcgcctcgttccgcacgaggccaagctcgagctgtaccaggtccatgccgtgaccgaaggcaccgacgcccaggcggaagtctcggtgcgtttgtcgcatgacggccgctcgatgacggcgcgcgcggccgatcccgatacgctggtggcctcggccaaggcctatctcggcgcgctcaacaagatcgtcatgaagcgccagcgcgacacggtgacgaccgccgcggcgagctga

SEQ ID NO: 7060 - protein, 520 aa, Bradyrhizobium japonicum
MAPVNKSDKDRVIIFDTTLRDGEQCPGATMTFEEKLEVAELLDDMGVDVIEAGFPITSEGDFQAVSEIARRSKNAVIAGLSRAHPADIDRCAEAVKFAKRGRVHTVIATSPLHMRVKLNKTPEQVIETSVAMVARARNQIDDVEWSAEDGTRSEMDYLCRIVEAVIKAGATTVNIPDTVGYTVPEEYTHFMKTLIERVPNSDKAVFSVHCHNDLGMAVANSLAGVVGGARQVECTINGIGERAGNAALEEIVMAINVRNDKFPYWNKIDTTQLTRASKVVSAATSFPVQYNKAIVGRNAFAHESGIHQDGVLKDASTYEIMRPEMVGLKQSSLVLGKHSGRHAFVHKLEEMGYKLGPNQLEDAFTRMKALADRKKDIYDEDIEALVDEEMAASHDRIKLTSLTVIAGTHGPQRATMKLDVDGQIKIEEAEGNGPVDAVFNCIKRLVPHEAKLELYQVHAVTEGTDAQAEVSVRLSHDGRSMTARAADPDTLVASAKAYLGALNKIVMKRQRDTVTTAAAS

SEQ ID NO: 7061 - DNA, 1173 bp, Buchnera aphidicola subsp
  CDS (1)..(1173): transl_table=11
atgactcaaaaaataattatttttgatacaacattacgagatggagaacagtctctaaaaatgagtttaagtgttaaaaaaaaactcaaaattgcttttgctttagaaaaattaggtgttgatgtaattgaagcaggttttccaatttcttcgcctggtgattttgagtctgttaaaaaaatttcggaaagaattaaagacgctaaaatttgtagtttagcacgatgtatagatggggatatagatatagcagctaaagctatgaaaaaagcgaattcatttcgtatacatatatttttgggaacatctgctttgcatgttcaatctaaattaaagaaaacatttgatcaaataatagatatgatggtttcttctgtaaaaagagctcagaaatatactgatgatgttgaattttcgtgtgaagatgctggtagaacatcattagatgatttatgtcgtattatagaattagctatagatttaggagtaaaaactattaatattcctgatacagtaggctatactattccttatgaatttagtaatattatttcatctatttacaaaaaagttccaaatattgataaagctataatatctgtacattgccatgatgatttgggaatggctgtagctaattctatttctgctattcaagttggtgctagacaaatcgaaggaactattactggagtaggagaacgtgcaggaaatgcagcattggaagaaatattgatggcaataaaaataagaaaagatattttaaattttaaaacaaatataaaatatcaagaaatttacagtacttgtagggttattagttcaatttgtaatatacctgttcctgtgaataaagcgataataggaagtaatgcgttttcgcattcatctggaattcatcaagatggaattttaaaagataaaaaaacttatgaaattatagtgccagaaagtataggatttgtgtctcagccattaaatttaacttctcgatctggtcgtgcagctgtaaaatatcgcatgaaaaagataggttataaagatagtgattataatatagatattttgtattctaggtttttaaagttagctgataaaaaaggtcgagtatctgatagtgatttaaaacagttagtatgttttaataataaattaaaaaatttaaaggattaa

SEQ ID NO: 7062 - protein, 390 aa, Buchnera aphidicola subsp
MTQKIIIFDTTLRDGEQSLKMSLSVKKKLKIAFALEKLGVDVIEAGFPISSPGDFESVKKISERIKDAKICSLARCIDGDIDIAAKAMKKANSFRIHIFLGTSALHVQSKLKKTFDQIIDMMVSSVKRAQKYTDDVEFSCEDAGRTSLDDLCRIIELAIDLGVKTINIPDTVGYTIPYEFSNIISSIYKKVPNIDKAIISVHCHDDLGMAVANSISAIQVGARQIEGTITGVGERAGNAALEEILMAIKIRKDILNFKTNIKYQEIYSTCRVISSICNIPVPVNKAIIGSNAFSHSSGIHQDGILKDKKTYEIIVPESIGFVSQPLNLTSRSGRAAVKYRMKKIGYKDSDYNIDILYSRFLKLADKKGRVSDSDLKQLVCFNNKLKNLKD

SEQ ID NO: 7063 - DNA, 1572 bp, Escherichia coli O157
  CDS (1)..(1572): transl_table=11
atgagccagcaagtcattattttcgataccacattgcgcgacggtgaacaggcgttacaggcaagcttgagtgtgaaagaaaaactgcaaattgcgctggcccttgagcgtatgggtgttgacgtgatggaagtcgggttccccgtctcttcgccgggtgattttgaatcagtgcaaaccatcgctcgccaggttaaaaacagccgtgtatgcgcgttagctcgctgcgtggagaaagatatcgacgtggcggccgaatccctgaaagtcgccgaagccttccgtattcatacctttattgccacttcgccaatgcacatcgccaccaagctgcgcagcacgctggacgaggtgatcgaacgcgctatctatatggtgaaacgcgcccgtaattacaccgatgatgttgaattttcttgcgaagatgccgggcgtacacccattgccgatctggcgcgagtggtcgaagcggcgattaatgccggtgccaccaccatcaacattccggacaccgtgggctacaccatgccgtttgagttcgccggaatcattagcggcctgtatgaacgcgtgcctaacatcgacaaagccattatttccgtacatacccacgacgatttgggcctggcggtcggcaactcactggcggcggtacatgccggtgcacgccaggtggaaggtgcaatgaacgggatcggcgagcgtgccggtaactgttccctggaagaagtcatcatggcgattaaagttcgtaaggatattctcaacgtccacaccgccattaatcaccaggagatatggcgcaccagccagttagttagccagatttgtaatatgccgatcccggcaaacaaagccattgttggcagcggcgcattcgcacactcctccggtatccaccaggatggcgtgctgaaaaaccgcgaaaactacgaaatcatgacaccagaatctattggtctgaaccaaatccagctgaatctgacctctcgttcggggcgtgcggcggtgaaacatcgcatggatgagatggggtataaagaaagtgaatataatttagacaatttgtacgacgccttcctcaagctggcggacaaaaaaggtcaggtgtttgattacgatctggaggcgctggccttcatcggtaagcagcaagaagagccggagcatttccgtctggattacttcagcgtgcagtctggctctaacgatatcgccaccgccgccgtcaaactggcctgcggcgaagaagtcaaagcagaagccgccaacggtaacggtccggtcgatgccgtctatcaggcgattaaccgcatcactgactataacgtcgaactggtgaaatacagcctgaccgccaaaggtcacggtaaagatgcgctgggtcaggtggatattgtcgccaactacaacggtcgccgcttccacggcgtcggcctggccaccgatattgtcgagtcctccgccaaagccatggtgcacgtacttaacaatatctggcgtgccacagaagtcgaaaaagagttgcaacgcaaagctcaacacaacgaaaacaacaaggaaaccgtgtga

SEQ ID NO: 7064 - protein, 523 aa, Escherichia coli O157
MSQQVIIFDTTLRDGEQALQASLSVKEKLQIALALERMGVDVMEVGFPVSSPGDFESVQTIARQVKNSRVCALARCVEKDIDVAAESLKVAEAFRIHTFIATSPMHIATKLRSTLDEVIERAIYMVKRARNYTDDVEFSCEDAGRTPIADLARVVEAAINAGATTINIPDTVGYTMPFEFAGIISGLYERVPNIDKAIISVHTHDDLGLAVGNSLAAVHAGARQVEGAMNGIGERAGNCSLEEVIMAIKVRKDILNVHTAINHQEIWRTSQLVSQICNMPIPANKAIVGSGAFAHSSGIHQDGVLKNRENYEIMTPESIGLNQIQLNLTSRSGRAAVKHRMDEMGYKESEYNLDNLYDAFLKLADKKGQVFDYDLEALAFIGKQQEEPEHFRLDYFSVQSGSNDIATAAVKLACGEEVKAEAANGNGPVDAVYQAINRITDYNVELVKYSLTAKGHGKDALGQVDIVANYNGRRFHGVGLATDIVESSAKAMVHVLNNIWRATEVEKELQRKAQHNENNKETV

SEQ ID NO: 7065 - DNA, 1572 bp, Escherichia coli
  CDS (1)..(1572): transl_table=11
atgagccagcaagtcattattttcgataccacattgcgcgacggtgaacaggcgttacaggcaagcttgagtgtgaaagaaaaactgcaaattgcgctggcccttgagcgtatgggtgttgacgtgatggaagtcggtttccccgtctcttcgccgggcgattttgaatcggtgcaaaccatcgcccgccaggttaaaaacagccgcgtatgtgcgttagctcgctgcgtggaaaaagatatcgacgtggcggccgaatccctgaaagtcgccgaagccttccgtattcatacctttattgccacttcgccaatgcacatcgccaccaagctgcgcagcacgctggacgaggtgatcgaacgcgctatctatatggtgaaacgcgcccgtaattacaccgatgatgttgaattttcttgcgaagatgccgggcgtacacccattgccgatctggcgcgagtggtcgaagcggcgattaatgccggtgccaccaccatcaacattccggacaccgtgggctacaccatgccgtttgagttcgccggaatcatcagcggcctgtatgaacgcgtgcctaacatcgacaaagccattatctccgtacatacccacgacgatttgggcctggcggtcggaaactcactggcggcggtacatgccggtgcacgccaggtggaaggcgcaatgaacgggatcggcgagcgtgccggaaactgttccctggaagaagtcatcatggcgatcaaagttcgtaaggatattctcaacgtccacaccgccattaatcaccaggagatatggcgcaccagccagttagttagccagatttgtaatatgccgatcccggcaaacaaagccattgttggcagcggcgcattcgcacactcctccggtatacaccaggatggcgtgctgaaaaaccgcgaaaactacgaaatcatgacaccagaatctattggtctgaaccaaatccagctgaatctgacctctcgttcggggcgtgcggcggtgaaacatcgcatggatgagatggggtataaagaaagtgaatataatttagacaatttgtacgatgctttcctgaagctggcggacaaaaaaggtcaggtgtttgattacgatctggaggcgctggccttcatcggtaagcagcaagaagagccggagcatttccgtctggattacttcagcgtgcagtctggctctaacgatatcgccaccgccgccgtcaaactggcctgtggcgaagaagtcaaagcagaagccgccaacggtaacggtccggtcgatgccgtctatcaggcaattaaccgcatcactgaatataacgtcgaactggtgaaatacagcctgaccgccaaaggccacggtaaagatgcgctgggtcaggtggatatcgtcgctaactacaacggtcgccgcttccacggcgtcggcctggctaccgatattgtcgagtcatctgccaaagccatggtgcacgttctgaacaatatctggcgtgccgcagaagtcgaaaaagagttgcaacgcaaagctcaacacaacgaaaacaacaaggaaaccgtgtga

SEQ ID NO: 7066 - protein, 523 aa, Escherichia coli
MSQQVIIFDTTLRDGEQALQASLSVKEKLQIALALERMGVDVMEVGFPVSSPGDFESVQTIARQVKNSRVCALARCVEKDIDVAAESLKVAEAFRIHTFIATSPMHIATKLRSTLDEVIERAIYMVKRARNYTDDVEFSCEDAGRTPIADLARVVEAAINAGATTINIPDTVGYTMPFEFAGIISGLYERVPNIDKAIISVHTHDDLGLAVGNSLAAVHAGARQVEGAMNGIGERAGNCSLEEVIMAIKVRKDILNVHTAINHQEIWRTSQLVSQICNMPIPANKAIVGSGAFAHSSGIHQDGVLKNRENYEIMTPESIGLNQIQLNLTSRSGRAAVKHRMDEMGYKESEYNLDNLYDAFLKLADKKGQVFDYDLEALAFIGKQQEEPEHFRLDYFSVQSGSNDIATAAVKLACGEEVKAEAANGNGPVDAVYQAINRITEYNVELVKYSLTAKGHGKDALGQVDIVANYNGRRFHGVGLATDIVESSAKAMVHVLNNIWRAAEVEKELQRKAQHNENNKETV

SEQ ID NO: 7067 - DNA, 1617 bp, Gloeobacter violaceus
  CDS (1)..(1617): transl_table=11
atgtttcaggaccgcttgattatcttcgacaccacccttagagacggcgagcagtcgccgggggccacgctcaacgccgacgaaaaggtggagattgcccggcagcttgcccgactcggtgtcgatgtgatcgaggccggttttgcctacgccagccccggggattttgaggcggtcgagcgggtggcccgcacggtgggtaccgaggacgggccggtaatctgcagtctggcgcgggccatccgctcagacattcaagcggcggccgaggcgatccgccccgccgcccgcggtcgtatccacacgttcatctcgacttcggacattcacctggagcaccagttgcgcaaaagccgcgccgaggtgctcgccatcgccgccgagatggtggcctttgccaagggtttcgtggacgatgtcgaattttcaccgatggacgccggccgctccgccccggagtatctctaccgggtgctcgaagcggcaatcgcagccggggcgacgaccgtcaacatccccgacacggtgggctatctgacgcccgcagaattcggcggcctcatccgcgggatcacccagaacgtgcggggcatcgagcgggcggtgatttcggtgcactgccacaacgacctgggtctggcggtggccaattccctcgcggccatcgagaacggtgcccgtcagatcgagtgcacggtgaacgggatcggcgagcgggcgggcaactgttctctcgaagaaatcgtcatggccctgcacgtgcgccgccagttcttcaacccgatcttcggccgtccggccgattcgaccgtacccttgagtaccatcgacacccgccagatctacaaaagttcgcggctggtctcccacctgaccggcatgctcgtccagcccaacaaggcgatcgtcggggcgaacgcctttgcccacgagtcgggcatccatcaggacggcgtgctcaaaaaccggctcacctacgagatcatggacgccgagacagtcggggtcaacgaaaaccgcatcgtcctgggcaagcactcgggccgcaacgcctttcgcacccgattggtcgagttgggctacgaactgggcgacgccgatctcaaccgtgccttcttgcgctttaaagaactggcggacaagaaaaagaccgtgagcgactgggacatcgaggccgtcatctccgatgaaattcgcctcatccccgaagcctaccgcctggagcaggtgcaggtgagctgcggtgagccgggactgcccaccgccaccgtccgcctcaccggccccgacggcgtcgagcgcgtcgatgcggccgtgggcaccggcccggtggacgcggtctacaaggcgatcaaccgccttatcgaactacccaacgaactgatcgaattttcggtgcagtcggtgacggcgggcatcgatgcgatgggcgaagtgaccatccgcgtgcgccaggacggacgcaccttcagcggccacgcggccaacaccgatatcatcgtcgcctccgcccgcgcctacctcaacgccctcaacaagctccacttcgctctggcccaccccacccactccggcggcgccctcgcccaccccgacgccgccgcccagaaactctga

SEQ ID NO: 7068 - protein, 538 aa, Gloeobacter violaceus
MFQDRLIIFDTTLRDGEQSPGATLNADEKVEIARQLARLGVDVIEAGFAYASPGDFEAVERVARTVGTEDGPVICSLARAIRSDIQAAAEAIRPAARGRIHTFISTSDIHLEHQLRKSRAEVLAIAAEMVAFAKGFVDDVEFSPMDAGRSAPEYLYRVLEAAIAAGATTVNIPDTVGYLTPAEFGGLIRGITQNVRGIERAVISVHCHNDLGLAVANSLAAIENGARQIECTVNGIGERAGNCSLEEIVMALHVRRQFFNPIFGRPADSTVPLSTIDTRQIYKSSRLVSHLTGMLVQPNKAIVGANAFAHESGIHQDGVLKNRLTYEIMDAETVGVNENRIVLGKHSGRNAFRTRLVELGYELGDADLNRAFLRFKELADKKKTVSDWDIEAVISDEIRLIPEAYRLEQVQVSCGEPGLPTATVRLTGPDGVERVDAAVGTGPVDAVYKAINRLIELPNELIEFSVQSVTAGIDAMGEVTIRVRQDGRTFSGHAANTDIIVASARAYLNALNKLHFALAHPTHSGGALAHPDAAAQKL

SEQ ID NO: 7069 - DNA, 1602 bp, Microcystis aeruginosa
  CDS (1)..(1602): transl_table=11
atgaataccagtccagatcgtgtgattatcttcgataccacccttcgagatggggaacagtccccgggtgccgctttaaatgtggatgagaagctaaccatagcgcgcgcactggcacgactgggagttgatgtcattgaagcaggttttccccacgctagtccgggggactttgaagctgtacagaaaattgccggcagcgtcggcagcgaagctgatagcccaattatttgcggattagcccgggctacccaaaaagatatcaaatctgccgccgatgcgctcagacccgccgccaagcccagaattcacaccttcctagccacatctgatatacatctccaatacaaacttaagaagactcgtcaggaagttcttgagattgtgccggaaatggtggcctatgctaaatccttccttaatgatgtggaattttcccccgaagatgctggccgcagcgatccggaattcctctaccaagtcctcgaaagagcgatcgccgcaggagccaccaccgttaatattcccgataccgtcggttataccacccccagcgaatttggggctttaatccgtggtattaaggaaaatgtccccaatatcgaccaagcgattatctccgtccatggtcacgacgatctagggttagcggtggctaatttcctcgaagcagttaaaaatggcgctcgacagttggaatgtaccattaatgggatcggtgagcgtgccggtaatgcttccctagaagagttggtgatggcccttcatgtccggcgctcctattttaatcctttccttggtcgtccagcagagtccacggaacctttaaccaagatcaacaccaaggaaatctatcgcacttctcgcctagtttctaatcttaccggcatgatcgtgcaaccgaataaggcgatcgtcggtgctaacgctttcgcacacgagtcgggaatccatcaggacggggtgttaaaacataaactcacctatgagattatggatgcagaatcgatcggtttgactaataatcagatcgttctcggtaaactctccggccgcaacgcttttcgctctcggttacaggaattgggttttgagctttcggaaacggaacttaataacgcttttatccagtttaaagaaatggccgatcgcaaaaaggaaatcaccgatcgcgatctagaagctattgttaacgatgaaatcgatacggttcccgatcacttccgccttgaattagtacaagtgtcctgtggcaataacgccagacccacggccacggtaacgattcgcactcccgacggtagcgagttatccgatgcggccattggtacagggccagtagatgctctctgcaaagcgatcgatcgagtggtgcagattcctaacgaattaatctctttctcggtgcgagaagtgaccgagggaatcgatgctttaggagaagtgaccatccgtctccgttacgcaggacgcacctattctgctcgcgcagccgataccgatattattgttgcctccgctcgtgcctacgtcagtgccttaaaccgtctccacgtcgcactgcagcagaaggaaaaaaccccagaaatgctacaagtctag

SEQ ID NO: 7070 - protein, 533 aa, Microcystis aeruginosa
MNTSPDRVIIFDTTLRDGEQSPGAALNVDEKLTIARALARLGVDVIEAGFPHASPGDFEAVQKIAGSVGSEADSPIICGLARATQKDIKSAADALRPAAKPRIHTFLATSDIHLQYKLKKTRQEVLEIVPEMVAYAKSFLNDVEFSPEDAGRSDPEFLYQVLERAIAAGATTVNIPDTVGYTTPSEFGALIRGIKENVPNIDQAIISVHGHDDLGLAVANFLEAVKNGARQLECTINGIGERAGNASLEELVMALHVRRSYFNPFLGRPAESTEPLTKINTKEIYRTSRLVSNLTGMIVQPNKAIVGANAFAHESGIHQDGVLKHKLTYEIMDAESIGLTNNQIVLGKLSGRNAFRSRLQELGFELSETELNNAFIQFKEMADRKKEITDRDLEAIVNDEIDTVPDHFRLELVQVSCGNNARPTATVTIRTPDGSELSDAAIGTGPVDALCKAIDRVVQIPNELISFSVREVTEGIDALGEVTIRLRYAGRTYSARAADTDIIVASARAYVSALNRLHVALQQKEKTPEMLQV

SEQ ID NO: 7071 - DNA, 1611 bp, Prochlorococcus marinus
  CDS (1)..(1611): transl_table=11
atggccaaagatccaggccgagttcttatttttgatacgacactaagggatggcgagcagtctcctggtgcaagccttaacttggaagagaagcttgcgattgctcaacagcttgcaagattaggtgtagatataattgaagctggattcccttatgctagtcaaggggattttaaagctgttcaaaggattgctgatcaagtaggaggagaagagggtccgattatttgtggattagcaagggcatctaaggcagatattaaggcatgtgctgaagcaatagcacctgctcctcgcaaaaggattcatacctttattgcaactagtgatattcatttaaaacataagcttaggaagtcacgtgcagatgttctcaaaattgttccagagatggttggctatgcaagatcacttgcttctgatgttgaattctcttgtgaagatgcagcaagaagtgaccctgattttatgtacgaagtaatagaaagtgctattgcagcaggtgctgggacaataaatattcctgatacagttggttatataactccagcggaatttggagatttaattataggaataaacaaaaatgtatctaatatcgatgaatcaattttatcagtgcatggtcataacgatttaggcctcgctgttgcaaatttccttgaagcagtaaagaacggagcaaggcagcttgaatgcactattaatggtattggcgaaagagcaggtaatgctgctttagaggagttggtgatggctttgcatgtgcgaagaagatatttcaatcctttttttggtaaggattcagaaagtccaactccattaaccgctattcgaactgaagaaataacaaagacatctaggttggtttcaaatctcactggaatggttgttcagcctaataaagcaatagtaggtgcaaacgcttttgctcatgagtctggaattcatcaagatggagttttgaaaaacccactaacttatgaaattgttgatgctaagactgtgggacttgctgaaaatagaatttcattaggaaaattgagtggcaggagtgctgttagagctaggcttgaagagctaggttatgacttgactagagaagacttgaatgatgcttttgcaagattcaaggatctagcagatcgaaaaagagagatttcagatagagatcttgaggcaatagttagtgaacaagttatgcagcctgaagcgcgttttaagcttcacttggttcaagtaagttgtggtactgccttaagaccaactgcaactgtaactattgctgatcaagatgggatagaaaacacagcggtggcattaggtactggccctgttgatgcagtctgcaaagctctaaggtctttgaccaatgaaaaaaacgatttgattgagttttcagttaaatcagttacagaggggatagatgcccttggtgaagtaacaattaggcttagacgtgatggaaagattttttctggacattcagctgatacggatgtagttgtggctgctgctcaggcttatatcaatgcccttaatagacttgtctattccttgaaaaaatcatcactacatccacagcacgatgtagtgaaagcaaatttgtga

SEQ ID NO: 7072 - protein, 536 aa, Prochlorococcus marinus
MAKDPGRVLIFDTTLRDGEQSPGASLNLEEKLAIAQQLARLGVDIIEAGFPYASQGDFKAVQRIADQVGGEEGPIICGLARASKADIKACAEAIAPAPRKRIHTFIATSDIHLKHKLRKSRADVLKIVPEMVGYARSLASDVEFSCEDAARSDPDFMYEVIESAIAAGAGTINIPDTVGYITPAEFGDLIIGINKNVSNIDESILSVHGHNDLGLAVANFLEAVKNGARQLECTINGIGERAGNAALEELVMALHVRRRYFNPFFGKDSESPTPLTAIRTEEITKTSRLVSNLTGMVVQPNKAIVGANAFAHESGIHQDGVLKNPLTYEIVDAKTVGLAENRISLGKLSGRSAVRARLEELGYDLTREDLNDAFARFKDLADRKREISDRDLEAIVSEQVMQPEARFKLHLVQVSCGTALRPTATVTIADQDGIENTAVALGTGPVDAVCKALRSLTNEKNDLIEFSVKSVTEGIDALGEVTIRLRRDGKIFSGHSADTDVVVAAAQAYINALNRLVYSLKKSSLHPQHDVVKANL

SEQ ID NO: 7073 - DNA, 1086 bp, Pyrococcus horikoshii
  CDS (1)..(1086): transl_table=11
atgatattagactcaacattaagagaaggagaacaaactccaggggttaactactcaccagaacagaggttaagaatagctttagcgttggatgaaattggggtagatttcattgaagtggggcatccagcagtaagcaaggacgtatttataggtataaagctcatagcaagtcaagaccttaatgcaaatttactagcccactctagggccttactagaggatattgattacgttattcaggcagatgttgagtgggtgggaatattcttctgtctatctaatgcctgcttaagaaagaggtttaggatgtcactctctcaggccctcgagaggataagtaaagctatagaatacgcaaaagatcacggactaaaagtccgatttactccggaggatacaactagaacagaatgggagaacttgaggagggcaatagagcttgcaaaggagcttaaggtagataggataagcgtcgcagacactacaggaggtacccatccacttaggttctatactttggttaagaaggttgtgaactttgggatccctgtaaacgtacattgtcacaatgacttaggacttgcacttgcaaatgctataatgggaattgagggaggagcaactgtcgttgatgcgacagtcaacggacttggagagagagctggaatagttgacttagctcagatagtaacggttctttactatcactatggggtcaaaaagtacaggcttgataagctctatgagataagcagaatggtaagtgaaattacgggaatagctcttcaaccaaactatccaatagtgggcgaaaatgccttcacacacaaggctggtcttcacgtttcggccgttctaaaagatccaagattttacgagttcctgcctgcagaggtatttggaagggagagaacgatttacgtggatagatttgcgggaaaggacacgatcaggtactatttgcagaagcttgggataaatgatgaggagtttgttaaggttcttttaaagagagttaaaagctctagagagccgtttacctgggataagtttattgaagaagttaggaggctcaaaacatga

SEQ ID NO: 7074 - protein, 361 aa, Pyrococcus horikoshii
MILDSTLREGEQTPGVNYSPEQRLRIALALDEIGVDFIEVGHPAVSKDVFIGIKLIASQDLNANLLAHSRALLEDIDYVIQADVEWVGIFFCLSNACLRKRFRMSLSQALERISKAIEYAKDHGLKVRFTPEDTTRTEWENLRRAIELAKELKVDRISVADTTGGTHPLRFYTLVKKVVNFGIPVNVHCHNDLGLALANAIMGIEGGATVVDATVNGLGERAGIVDLAQIVTVLYYHYGVKKYRLDKLYEISRMVSEITGIALQPNYPIVGENAFTHKAGLHVSAVLKDPRFYEFLPAEVFGRERTIYVDRFAGKDTIRYYLQKLGINDEEFVKVLLKRVKSSREPFTWDKFIEEVRRLKT

SEQ ID NO: 7075 - DNA, 1572 bp, Salmonella typhimurium
  CDS (1)..(1572): transl_table=11
atgagccagcaagtcattatttttgatacgaccttacgcgacggcgaacaagcgttacaggccagcctgagcgcgaaagagaagctgcagattgccctggcccttgagcgcatgggtgttgatgtcatggaagtaggcttcccggtctcttctccgggtgattttgaatccgtccaaaccatcgcccgcaccattaaaaacagccgcgtttgcgccctggcgcgttgtgtagaaaaagacatcgacgtcgcggcacaggcgctgaaggtcgccgacgcgtttcgcatccatacttttatcgccacctcgccaatgcacatcgccaccaagctgcgcagcacgctggatgaggttatcgaacgcgcggtatacatggttaagcgggcgcgtaattacactgatgacgtagagttctcctgcgaagatgctggccggacgcctgttgacgatctggcgcgcgtggtggaagccgctataaacgccggcgcgagaaccattaatattcccgataccgtgggctataccatgccgtttgagtttgcgggaatcatttccggcctgtatgaacgtgtccccaatatcgacaaagctatcatctccgttcatacccacgacgatttagggatagcagtaggcaactcgctggcggcagtacatgcgggcgcgcgtcaggttgaaggcgcgatgaacggtatcggagaacgtgccggtaactgcgcactggaagaagtgatcatggcgattaaagtgcgcaaagacatcatgaacgtacacaccaacatcaatcaccacgaaatctggcgcaccagccagaccgtcagccagatctgtaacatgccgatcccagccaacaaagcgattgtcggcagcggcgctttcgcccactcttccggcatccaccaggatggcgtcctcaagaaccgcgaaaactatgaaatcatgacgccagagtccatcggtctgaaccagatacagctgaacctgacctcccgctctggccgtgccgccgtgaaacatcgcatggaagagatgggttacaaggacacagactacaacatggaccacctgtacgacgcgttcctgaagctggcggacaaaaaaggccaggtgttcgactatgacctggaagcgctggcgtttattaataaacagcaagaagaaccagagcatttccgtctggattacttcagcgtgcagtccggctccagcgatatcgccaccgcttccgtgaagctggcctgtggtgaagagatcaaggccgaagcggcgaacggcaacggtccggtcgacgccatctatcaggcgattaaccgcatcactggctacgacgttgagttggttaaatacgacctgaacgccaaaggccagggcaaagacgcgctgggtcaggtcgatatcgtcgtgaaccatcatggtcgccgcttccacggcgtcgggctggcgacggatatcgtcgaatcctccgccaaagcgatggtgcacgtactgaacaatatctggcgcgccgccgaagttgaaaaagaattgcaacgcaaagctcaaaataaagagaacaacaaggaaaccgtgtaa

SEQ ID NO: 7076 - protein, 523 aa, Salmonella typhimurium
MSQQVIIFDTTLRDGEQALQASLSAKEKLQIALALERMGVDVMEVGFPVSSPGDFESVQTIARTIKNSRVCALARCVEKDIDVAAQALKVADAFRIHTFIATSPMHIATKLRSTLDEVIERAVYMVKRARNYTDDVEFSCEDAGRTPVDDLARVVEAAINAGARTINIPDTVGYTMPFEFAGIISGLYERVPNIDKAIISVHTHDDLGIAVGNSLAAVHAGARQVEGAMNGIGERAGNCALEEVIMAIKVRKDIMNVHTNINHHEIWRTSQTVSQICNMPIPANKAIVGSGAFAHSSGIHQDGVLKNRENYEIMTPESIGLNQIQLNLTSRSGRAAVKHRMEEMGYKDTDYNMDHLYDAFLKLADKKGQVFDYDLEALAFINKQQEEPEHFRLDYFSVQSGSSDIATASVKLACGEEIKAEAANGNGPVDAIYQAINRITGYDVELVKYDLNAKGQGKDALGQVDIVVNHHGRRFHGVGLATDIVESSAKAMVHVLNNIWRAAEVEKELQRKAQNKENNKETV

SEQ ID NO: 7077 - DNA, 1698 bp, Glycine max
  CDS (1)..(1698)
atgccaaccaaaacctccactccaagttctcaatccccaaaactctctcatctccgccctcaatacattcccaaccacatccccgactcctcctacgtccgcatcttggacaccaccctccgcgacggcgaacaatccccgggagccaccatgacagcaaaggagaagctcgacatcgcacggcagctggtgaagctgggcgtggacatcatccagcccggcttcccttctgcgtcgaacagcgacttcatggccgtcaaaatgatagcacaagaggttggcaatgctgttgatgatgatggttatgtgcctgtcattgctggcttctgtcggtgcgttgagaaggacatttctactgcatgggaggctgtgaagtatgctaagaggccacggctttgtacttccatagctacgagccctattcacatggagcacaagctgagaaagagtaaagatcaggtgattcagattgccagggatatggtcaagtttgcacggagtttgggttgcaatgatattcagttcggtgctgaagatgctactagatcagatagagaatttctctatgaaattcttggagtagttattgaagccggggcaacaacagtgaacatagccgacactgtaggtatagtaatgccattggagttaggaaaattaattgttgatataaaagacaataccccaggaattgcgaatgttattatttcgactcattgccataatgatcttgggcttgctacggctaacaccatcgagggtgctcgtacaggtgcacggcaattagaagtaaccattaatgggattggtgaaagggctggaaatgcgtcgttagaagaggttgtgatggccttggcatccaagggagatcatgccttaaatggtctatatacaagaatcaatacaagacacatattagagacaagcaagatggtcgaagaatactccggtatgcatttacaacctcacaagcctcttgttggagctaatgcatttgtccatgcaagtggcattcatcaggatggaatgcttaaacataaaggtacatatgaaacaatatctcctgaggaaattggacataaaagaaccaccagaattggtattgtgctagggaagcttagtggaagccaagctttgagaaagagacttgaagagcttggttatgatcttaaggaagatgaagttgatagtgtgttttggcaattcaaagcaatggctgagaaaaaaaaggttgtaactgatgttgacctcaaagcattagtatcatataaagcttttcatgcagaatctatctggaagcttggtgatttacaagtgacttgtggaactattggtctttctacagcaacagtaaaacttgttaatattgatggtagcacacatgttgcttgttctattggtataggagcagtggattcaacttacaaggccattaatctcattgtgaaggaacctacaaaacttttggattactcattgaattcagttacagaaggcattggtgtaaatgtcacagcacgtgttgtaatttgtagggagaacaatcatacatctacttatgctttcactgaagatgctaattatccaacatttagtgggattgcagcagaaatggatgttgttgtttccactgttaaggcttatctggttgcactaaacaagttgttacgatggaaggaatcatttagatgtgcttaa

SEQ ID NO: 7078 - protein, 565 aa, Glycine max
MPTKTSTPSSQSPKLSHLRPQYIPNHIPDSSYVRILDTTLRDGEQSPGATMTAKEKLDIARQLVKLGVDIIQPGFPSASNSDFMAVKMIAQEVGNAVDDDGYVPVIAGFCRCVEKDISTAWEAVKYAKRPRLCTSIATSPIHMEHKLRKSKDQVIQIARDMVKFARSLGCNDIQFGAEDATRSDREFLYEILGVVIEAGATTVNIADTVGIVMPLELGKLIVDIKDNTPGIANVIISTHCHNDLGLATANTIEGARTGARQLEVTINGIGERAGNASLEEVVMALASKGDHALNGLYTRINTRHILETSKMVEEYSGMHLQPHKPLVGANAFVHASGIHQDGMLKHKGTYETISPEEIGHKRTTRIGIVLGKLSGSQALRKRLEELGYDLKEDEVDSVFWQFKAMAEKKKVVTDVDLKALVSYKAFHAESIWKLGDLQVTCGTIGLSTATVKLVNIDGSTHVACSIGIGAVDSTYKAINLIVKEPTKLLDYSLNSVTEGIGVNVTARVVICRENNHTSTYAFTEDANYPTFSGIAAEMDVVVSTVKAYLVALNKLLRWKESFRCA

SEQ ID NO: 7079 - DNA, 1608 bp, Synechococcus elongatus
  CDS (1)..(1608): transl_table=11
atgcgcattaaatatcctccccagaccgttgatcgggtgttaattttcgataccacattgcgggacggtgagcagtctccaggtgcctcactgaatgtggatgaaaaactgacgatcgcccgtcaactggctcgactgggggtggatattattgaggcgggttttccctttgccagccccggcgattttgaagccgtacagcggattgccgaaactgtcggcaccgaaaccgggcctgtcatttgtggtttggctcgtgccacccgccaagatattgaagccgctgccaaagccctcaaacccgcctactatcctcgcattcacacgtttattgccacctccgatattcacctagagtacaagctcaggaaaacccgcgctgaagtactggaaattgcccaagaaatggtggcctatgccaagtcttttgtggatgatgtcgagttttccccagaggatgctgggcgatcagatcctgagtttctctatgaagtcctagagcgggtcattgacgccggtgcaacgacggtcaacattcctgacactgtggggtacaccacccccgccgaatttggtgccctgatcaaaggcattaaggaaaatgtgcccaatatcgatcgcgccgtcatctcggttcatggtcacaatgacttgggtttggcagttgctaacttcctggaagcggtgaaaaatggcgcccggcaactggagtgtacgattaatggcattggtgagcgtgcgggaaatgccgcccttgaggaattggtgatggcactctatgtgcggcggcagtacttcaatcccttcctaggtcgcccacccgaatcagaggcacccctaacaaatatcaacacccgtgaaatttataaaacctcccgcttggtctcaaatctaacggggatgctgattcaacccaacaaggcgatcgtgggtgccaatgcctttgcccatcaatcggggattcaccaagatggcgtcctcaagcacaagcaaacctatgaaatcatggatgcccaactcattggccttgccgataaccaaattgtcttgggcaagctctctggccgtaatgcctttgccactcgcctgcgggaattgggctttgaactcagtgaaacggaactcaataaggcctttttgcgctttaaggatctcgccgacaagaaaaaagaaatcactgactgggatctggaggcgatcgccaaggatgaaacccaagggattgatctacagggctatcaactggaatttgtccaagtttcctgtggtgatcatgcccgcccaaccgcaacggttaccgtacgtacccccagtggggaagagttgaccgatgccgccatcggcactggccctgtggacgcagtctatcgcgccattaaccgtgtggtgcaaattcccaatcgcctcattgaatactcagtacaatcggttaccgccggcattgatgctatcggtgaggtgacgattcggctacagcaccaggatcgcatctactctggccatgccgccaacacggatattattgtcgcctctgcccaagcctatatgaatgccctgaaccgcctctaccgcggtcttgaacaacgggcgctacatccccaagcgtag

SEQ ID NO: 7080 - protein, 535 aa, Synechococcus elongatus
MRIKYPPQTVDRVLIFDTTLRDGEQSPGASLNVDEKLTIARQLARLGVDIIEAGFPFASPGDFEAVQRIAETVGTETGPVICGLARATRQDIEAAAKALKPAYYPRIHTFIATSDIHLEYKLRKTRAEVLEIAQEMVAYAKSFVDDVEFSPEDAGRSDPEFLYEVLERVIDAGATTVNIPDTVGYTTPAEFGALIKGIKENVPNIDRAVISVHGHNDLGLAVANFLEAVKNGARQLECTINGIGERAGNAALEELVMALYVRRQYFNPFLGRPPESEAPLTNINTREIYKTSRLVSNLTGMLIQPNKAIVGANAFAHQSGIHQDGVLKHKQTYEIMDAQLIGLADNQIVLGKLSGRNAFATRLRELGFELSETELNKAFLRFKDLADKKKEITDWDLEAIAKDETQGIDLQGYQLEFVQVSCGDHARPTATVTVRTPSGEELTDAAIGTGPVDAVYRAINRVVQIPNRLIEYSVQSVTAGIDAIGEVTIRLQHQDRIYSGHAANTDIIVASAQAYMNALNRLYRGLEQRALHPQA

SEQ ID NO: 7081 - DNA, 1602 bp, Synechocystis sp
  CDS (1)..(1602): transl_table=11
atgaatagtcctgttgatcgtattttgattttcgacaccacgcttcgcgatggggaacagtcccccggagccaccctgaccgtggaagaaaaactatcgatcgccagggctctagcccgtttaggggtggatattatcgaagcgggttttccctttgctagccccggggattttgaggcggtgcagaaaatcgcccaaacggtgggtacggaaaatgggccagtaatttgcggcttagctcgggccacccaaaaagatatcaaagcagcggcggaagcgttaaaaccagcggctaaacaccgtattcacaccttcttagctacgtcggacattcacctggagcataagttaaagaaaaccagggcggaggtgttggcgatcgtgccggaaatggtggcctatgccaaatccttagtgaatgacattgagttttccccggaggatgccgggcgcagtgatcccgaatttctttaccaagtgttagaagcggcgatctccgccggagccaccacgatcaacattcccgatacggtgggttacacaaccccggcagaatatggggctttaatcaaaggtattgccgataacgtgcctaacattgaccaggcgattatttccgtccatggccacaacgatttgggcttagcggtggccaattttctggaagcggtgaaaaatggggctcgacaactggaatgtaccatcaatggcattggcgaacgggctggtaatgcggccttggaagaattggtcatggctttacatgtgcgccgcagttacttcaatccctttttaggtcgccccgccgattccaccgcacctctgaccaacattgataccaaacatatttacgccacttcccgcttggtgtcggagttaacggggatgatggtgcaacccaataaggccattgttggcgctaatgcctttgcccatgaatccggcattcaccaggatggggtgctaaaaaataagctcacctacgaaatcatggatgcggaatccatcggtttaaccaataaccagattgtgttgggtaaactctccggccgcaatgcctttggtactcgcttaaaggaattgggttttgacctgagcgatacggaattaaataacgcctttattcgctttaaggaagtggcggataagcgtaaagaaattaccgattgggatttagaggcaatcgttaacgatgaaattcgccaaccccccgaactcttccgtttggaacgggtacaggtttcctgtggtgagccttcggtgcccaccgctaccctaaccattcgtaccccggctggcccagaagaaaccgctgtggcgatcggtacgggcccggtggatgcagtgtataaagctattaatcagattgtgcaattgcccaatgagctgctggaatattccgtcacctccgtcaccgaaggcattgatgcgttgggtaaagtgagtgtgcgtctgcgccataacggggtgatctacaccggctatgcggccaacacggatatcattgtcgcctcggcccgggcctatctgggggcattaaaccgtctttatgctgccctggagaaatcccgggagcatccccccgtcgtcgcttccctttaa

SEQ ID NO: 7082 - protein, 533 aa, Synechocystis sp
MNSPVDRILIFDTTLRDGEQSPGATLTVEEKLSIARALARLGVDIIEAGFPFASPGDFEAVQKIAQTVGTENGPVICGLARATQKDIKAAAEALKPAAKHRIHTFLATSDIHLEHKLKKTRAEVLAIVPEMVAYAKSLVNDIEFSPEDAGRSDPEFLYQVLEAAISAGATTINIPDTVGYTTPAEYGALIKGIADNVPNIDQAIISVHGHNDLGLAVANFLEAVKNGARQLECTINGIGERAGNAALEELVMALHVRRSYFNPFLGRPADSTAPLTNIDTKHIYATSRLVSELTGMMVQPNKAIVGANAFAHESGIHQDGVLKNKLTYEIMDAESIGLTNNQIVLGKLSGRNAFGTRLKELGFDLSDTELNNAFIRFKEVADKRKEITDWDLEAIVNDEIRQPPELFRLERVQVSCGEPSVPTATLTIRTPAGPEETAVAIGTGPVDAVYKAINQIVQLPNELLEYSVTSVTEGIDALGKVSVRLRHNGVIYTGYAANTDIIVASARAYLGALNRLYAALEKSREHPPVVASL

SEQ ID NO: 7083 - DNA, 1551 bp, Vibrio cholerae
  CDS (1)..(1551): transl_table=11
atgaacaatcaggtgattatattcgataccacattacgcgatggagagcaggctttgtctgccagcctgacggtaaaagagaaactgcaaatcgcctacgcactggagcgcttaggggtagatattatcgaagcaggtttccctgtttcctctccgggcgattttgaatcggtacaaaccatcgctaaaaacatcaaaaatagccgtgtttgtgccctttcgcgagccgttgcgaaagacattgatgccgcggcagaagccttgaaagtcgccgaagcctttcgtattcacacttttatctccacatccactatccatgtacaagacaaattgcgccgcagctatgacgatgtcgtcgcaatggcagtcaaagcggtgaaacatgcgcgtcaatatacggatgatgtggagttctcttgtgaagatgctggccgcacacctatcgataacttgtgccgtatggtcgaagccgcgatcaatgccggtgcgcgtaccatcaatattccagatacggtcggctacacagtgccgagcgaatttggcggcattattcaaacgctgtttaaccgagtgcccaatatcgataaagcgatcatctccgtgcattgtcatgacgacttaggcatgtcggtagccaactcgattgccgctattcaagcgggagctcgtcaagtagagggaaccatcaacggtattggcgaacgtgcgggtaactgcgcattggaagagatcgcgatgatcatcaaaacccgtcaagagttgctcggggtaaccacaggcattaaacacgacgagatcagccgtaccagcaagcttgtcagccagctatgcaacatgccgattcaaagcaacaaagcgattgtcggagccaatgcgtttagccactcttcgggcattcaccaagatggcatgctcaaaaacaaaaatacctacgaaatcatgacccccgaatcgataggcctcaaaaaccaagcactgaacctcactagtcgtagtgggcgtgccgcagtgaaaagccatatggattcaatgggctacaacgaaaatgaatacaatttggatgccttgtatgaagacttcttgaagctggcagatcgcaaaggccaagtgtttgattacgatttagaggccttgatgcatttctctaatttgcgtgaagaagatgacttctacaaactcaattacttgagcgtgcaatcgggtagcgtgatggccaccaccagtattaagttgctgtgtggcggtgaagaaaaatgcgaagccgctgttggtaatggtccagtcgatgcgttatatcagtgtatctatcgcatcacagggtatgagattgtactcgataaattcgatctcaccgccaaaggcgaaggtgaagatggtcttggtcaagcggatatcatcgccaactacaaaggacgtaaatatcacggtaccggcgtctcaaccgacatcgttgaagcttccggtcaagccttgttgcatgttatcaatagcattcatcgcgcggatcaaatcgcccagattaaacagaaaaaaagcgtcgctacggtttaa

SEQ ID NO: 7084 - protein, 516 aa, Vibrio cholerae
MNNQVIIFDTTLRDGEQALSASLTVKEKLQIAYALERLGVDIIEAGFPVSSPGDFESVQTIAKNIKNSRVCALSRAVAKDIDAAAEALKVAEAFRIHTFISTSTIHVQDKLRRSYDDVVAMAVKAVKHARQYTDDVEFSCEDAGRTPIDNLCRMVEAAINAGARTINIPDTVGYTVPSEFGGIIQTLFNRVPNIDKAIISVHCHDDLGMSVANSIAAIQAGARQVEGTINGIGERAGNCALEEIAMIIKTRQELLGVTTGIKHDEISRTSKLVSQLCNMPIQSNKAIVGANAFSHSSGIHQDGMLKNKNTYEIMTPESIGLKNQALNLTSRSGRAAVKSHMDSMGYNENEYNLDALYEDFLKLADRKGQVFDYDLEALMHFSNLREEDDFYKLNYLSVQSGSVMATTSIKLLCGGEEKCEAAVGNGPVDALYQCIYRITGYEIVLDKFDLTAKGEGEDGLGQADIIANYKGRKYHGTGVSTDIVEASGQALLHVINSIHRADQIAQIKQKKSVATV

SEQ ID NO: 7085 - DNA, 1560 bp, Wolinella succinogenes
  CDS (1)..(1560): transl_table=11
atgtccgctgaaatgattaaaatatttgacactaccctaagagatggggagcagagccccggagcttcgatgaacaccgaggagaagattcgaatcgccaagcagttggagcgcctaggcgtggatgtgattgaagcaggttttgctgcggcaagccctggggattttgatgcaatctccaaaatcgcctcagccgtgagcgaaagcaccatctgctcgttggctagagccgttgaaaaggatatcaaagccgccgctgattctttggcgcctgctaagcttaagcgaatccataccttcatcgcgacaagtcccattcatatggaatataagcttcgtatgactccaagcgaagtgatcaaaagggcagtggaggcgattgcctatgccaaaagtttcatggaggatgtagagtttagctgcgaagatgcagggcgaagtgatgtaggatttttgaaggagattctagcggcagtcattgaggcaggagcaggaacgctcaatattcccgatacagtagggtatcgacttcctcatgagatgggggctatcatcaaagagttgcatgaatttgtggggaatcgagcgattctctccgtgcattgccacaatgacttgggtctagcggtggccaactctctctattgcattcaaagtggagctaggcaagtggagtgcacggtcaatggtttgggtgagcgagcaggaaatgcggcgctagaggagatcgtcatggcgattaagactcgcagagatatctttggggggcttgatacaagaatcaacaccaaagagatatacgcaagcagtcaattggtcgccaatatcacgggaatcagaccccagcccaacaaggccattgtgggcaaaaatgcttttgcacacgagagcggaatccatcaagatggcgtgctcaagcacaaagagacctatgagatcatgcacgctagcgatattgggctaggcgagcaagagagtattgtgcttgggaaacactcaggacgtcacgcctttaaagacaagatcaaggcgcttggttttgaggtgagctatgaagaacttaacgccgcttttgatcggtttaaggcgctctgcgatcaaaaaaaagagatttatgatgaggacattcgagcgattcttgcggaagagacctcgcatattcccaaggtttatgagcttgtgggaatccagcttagcgattgctcgatgggccgaccctatgcagccatcactcttaaaaaagaagggagtgaagagattgtggacgccgcgattggaaatggtagtgtggatgccctctttaagaccatcgatcgaatcagtcagatcaaaggagagctcaaggattacaaagtggaagcggtcacgcaaggaaaagatgccttggcgaaggtggtggtgaaggtcgagtttgaggagaataaacctgctattattggtcatggtcttcatattgacacgatgctagcgacagcgaaggcctacgtgggcgcgctcaatagctacttgtcgatgagggagcttatgggtaagaagaagtgcgaagaggagagaatctaa

SEQ ID NO: 7086 - protein, 519 aa, Wolinella succinogenes
MSAEMIKIFDTTLRDGEQSPGASMNTEEKIRIAKQLERLGVDVIEAGFAAASPGDFDAISKIASAVSESTICSLARAVEKDIKAAADSLAPAKLKRIHTFIATSPIHMEYKLRMTPSEVIKRAVEAIAYAKSFMEDVEFSCEDAGRSDVGFLKEILAAVIEAGAGTLNIPDTVGYRLPHEMGAIIKELHEFVGNRAILSVHCHNDLGLAVANSLYCIQSGARQVECTVNGLGERAGNAALEEIVMAIKTRRDIFGGLDTRINTKEIYASSQLVANITGIRPQPNKAIVGKNAFAHESGIHQDGVLKHKETYEIMHASDIGLGEQESIVLGKHSGRHAFKDKIKALGFEVSYEELNAAFDRFKALCDQKKEIYDEDIRAILAEETSHIPKVYELVGIQLSDCSMGRPYAAITLKKEGSEEIVDAAIGNGSVDALFKTIDRISQIKGELKDYKVEAVTQGKDALAKVVVKVEFEENKPAIIGHGLHIDTMLATAKAYVGALNSYLSMRELMGKKKCEEERI

SEQ ID NO: 7087 - DNA, 1605 bp, Streptomyces coelicolor
  CDS (1)..(1605): transl_table=11
atgaccgcaaccagcgaactcgacgattcgttccacgtcttcgacaccaccctgcgcgacggcgcgcagcgcgagggcatcaacctcacggtcgcggacaagctggccatcgcacggcacctggacgacttcggggtgggcttcatcgagggcggctggcccggcgccaacccgcgggacaccgagttcttcgcccgcgcccggcaggagatcgacttcaagcacgcccagctggtcgccttcggctccacccgccgcgcgggcgcgaacgccgccgaggaccaccaggtcaaggcgctgctcgactccggcgcccaggtgatcaccctggtcgccaagtcgcacgaccggcacgtcgaactggccctgcgcaccacgctggacgagaacctcgcgatggtggccgacacggtctcccacctgaaggcgcagggccgccgggtcttcgtcgactgcgagcacttcttcgacggctaccgcgccaaccccgagtacgcgaagtcggtcgtgcgcaccgcctccgaggccggcgccgacgtcgtcgtcctgtgcgacaccaacggcggcatgctcccggcgcagatccaggcggtggtcgccacggtgctggccgacaccggcgcccggctcggcatccacgcccaggacgacaccggctgcgccgtcgccaacaccctcgccgccgtcgacgcgggcgcgacccacgtccagtgcacggccaacggctacggcgagcgggtcggcaacgccaacctgttccccgtcgtggccgcgctggagctgaagtacggcaagcaggtgctgcccgagggccggctgcgcgagatgacccgcatctcccacgccatcgccgaggtcgtcaacctcacgccctccacccaccagccctacgtgggcgtctccgccttcgcccacaaggccggcctgcacgcctccgcgatcaaggtcgacccggacctctaccagcacatcgaccccgaactggtcggcaacaccatgcggatgctggtctccgacatggcgggacgtgcctccatcgagctgaagggcaaggagctcgggatcgacctcggcggcgaccgcgagctggtcggccgggtcgtggagcgggtcaaggagcgcgagctggccggctacacctacgaggccgccgacgcgagcttcgagctgctgctgcgcgccgaggccgagggcaggccgctgaagtacttcgaggtcgagtcctggcgcgcgatcaccgaggaccgccccgacggcagccacgccaacgaggccacggtcaagctctgggccaagggcgagcgcatcgtcgccaccgccgagggcaacggcccggtcaacgccctggaccggtcgctgcgcgtggccctggagaagatctaccccgagctggccaagctcgacctggtcgactacaaggtccgcatcctggagggcgtgcacggcacccagtccaccaccagggtcctcatctccacgtccgacggcacgggggagtgggccacggtgggtgtcgcggagaacgtcatcgccgcctcctggcaggcgctggaggacgcgtacacgtacgggctgctgcgggcgggggtcgcgcccgccgagtga

SEQ ID NO: 7088 - protein, 534 aa, Streptomyces coelicolor
MTATSELDDSFHVFDTTLRDGAQREGINLTVADKLAIARHLDDFGVGFIEGGWPGANPRDTEFFARARQEIDFKHAQLVAFGSTRRAGANAAEDHQVKALLDSGAQVITLVAKSHDRHVELALRTTLDENLAMVADTVSHLKAQGRRVFVDCEHFFDGYRANPEYAKSVVRTASEAGADVVVLCDTNGGMLPAQIQAVVATVLADTGARLGIHAQDDTGCAVANTLAAVDAGATHVQCTANGYGERVGNANLFPVVAALELKYGKQVLPEGRLREMTRISHAIAEVVNLTPSTHQPYVGVSAFAHKAGLHASAIKVDPDLYQHIDPELVGNTMRMLVSDMAGRASIELKGKELGIDLGGDRELVGRVVERVKERELAGYTYEAADASFELLLRAEAEGRPLKYFEVESWRAITEDRPDGSHANEATVKLWAKGERIVATAEGNGPVNALDRSLRVALEKIYPELAKLDLVDYKVRILEGVHGTQSTTRVLISTSDGTGEWATVGVAENVIAASWQALEDAYTYGLLRAGVAPAE

SEQ ID NO: 7089 - DNA, 1131 bp, Anabaena sp
  CDS (1)..(1131): transl_table=11
atgaataaagttctaattaatgacactacactacgcgatggagagcaagcggctggtgttgcttttagcgtagaggaaaaaatagcgatcgccaaatttctcgatgcaattggtgtgcatgaaatcgaagtgggaatacccgcaatgggtaaagcagaacaagaggcgatcgctaatattgtgaagttagatttgtcagcaaatttacttggttggaaccgcgccgtgattgctgatattcaggcttccatcgcttgtggtttacagcgagtacatatctctattcccgtttctgcaatccaaatcgccgtcaaatttcacggacaatggcaagtagttttacaaaaactccacgatagtattagctttgctgttgaccaaggtttatttgtctccatcggtggtgaagactcatcaagagccgaagaaagcttcctccttgatgtagtgctagctgctcaagaatggggtgcgtcacgatttcgcttttgcgacacagtaggtattcttgacccgttcactacccacgccaaggtaaaacaattggtggcatctttgacaatacctgtagaaatgcacacccacaatgattttggtttggcaacagccaacgctctggcaggtaccaaagcaggcgctttatctgtaaatactactgtgaatggattaggtgaaagagccgggaatgctgctttagaagaggtggttatggctctcaagcacttgtatcaccatgacttaggaattgatacacggcgtttactggaaatatctcaactcgtagcatcagcatcaggtcatcctgtaccaccttggaaagcaattgttggtgaaaatacttttgctcacgaatccgggattcacgctcatggtgtactgcaaaatcctcaaacctacgagccatttgcaccagaagaagtagggagagagcgccgtttagttgtgggtaaacattctggtagacatttactctctagtattttgcagcaacacgacattattctcaatcacgaagaaacccaatttgtcttagatgcagttagacaagaatcagtagaaaaaaaacgcagcctcacagatcaagaacttttgcatttagtgcagacaaaacaacattttcgtgcttgttga

SEQ ID NO: 7090 - protein, 376 aa, Anabaena sp
MNKVLINDTTLRDGEQAAGVAFSVEEKIAIAKFLDAIGVHEIEVGIPAMGKAEQEAIANIVKLDLSANLLGWNRAVIADIQASIACGLQRVHISIPVSAIQIAVKFHGQWQVVLQKLHDSISFAVDQGLFVSIGGEDSSRAEESFLLDVVLAAQEWGASRFRFCDTVGILDPFTTHAKVKQLVASLTIPVEMHTHNDFGLATANALAGTKAGALSVNTTVNGLGERAGNAALEEVVMALKHLYHHDLGIDTRRLLEISQLVASASGHPVPPWKAIVGENTFAHESGIHAHGVLQNPQTYEPFAPEEVGRERRLVVGKHSGRHLLSSILQQHDIILNHEETQFVLDAVRQESVEKKRSLTDQELLHLVQTKQHFRAC

SEQ ID NO: 7091 - DNA, 1149 bp, Azotobacter chroococcum mcd 1
  CDS (1)..(1149): transl_table=11
atggctagcgtgatcatcgacgacaccaccctgcgtgacggcgagcagagtgccggggtcgccttcaatgccgacgagaagatcgccatccggcgtgcgctcgccgagctgggcgtaccggagctggagatcggcattcccagcatgggcgaggaggagcgcgaggtgatgcgcgccattgccggcctcggcctgtcgtcgcgcctgctggcctggtgccggctgtgcgacttcgacctctcggccgcgcgctccaccggggtgaccatggtcgacctgtcactgccgatctccgacctgatgctgcgccacaagctcaatcgtgatcgcgactgggcactgggcgaggtcgcccggctggtcagcgaggcgcgcatggccgggcttgaggtgtgcctgggctgcgaggacgcctcgcgggcggatcaggacttcatcgtgcgggtgggggcggtggcgcaggccgcgcgcccgccgcctgcgttcgccgataccgtcggggtgatggagccgttcggcatgctcgaccgcttccgtttcctccgccagcgcctggacgtggagctggaggtgcacgcccacgacgacttcgggctggccaccgccaacaccctggcggcggtgatgggcggggcgacccacatcaataccacggtcaacgggctcggcgagcgcgccgccaacgccgcgctggaagagtgcgtgctggcgctcaagaacctccacggcatcgacaccggcatcgacacccgcggcatcccggccatctcggcgctggtcgagcgggcctcggggcgtcagtggcctggcagaagagcgtggttggcgccggtgttcacccacgaggccggcatccacgtcgacgggctgctcaagcaccggcgcaactacgagggactgaatcccgacgagctcggccgcagccacagcctggtgctgggcaagcattccggcgcgcacatggtgcgcaacagctaccgcgagctgggcatcgagctggccgactggcagagccaggcactgctcggccgcatccgcgccttctccacccgcaccaagcgcagcccgcaggctgccgagctggaggacttctatcgccagctgtgcgagcaggggactgccgaactggcggcaggaggaatggcatga

SEQ ID NO: 7092 - protein, 382 aa, Azotobacter chroococcum mcd 1
MASVIIDDTTLRDGEQSAGVAFNADEKIAIRRALAELGVPELEIGIPSMGEEEREVMRAIAGLGLSSRLLAWCRLCDFDLSAARSTGVTMVDLSLPISDLMLRHKLNRDRDWALGEVARLVSEARMAGLEVCLGCEDASRADQDFIVRVGAVAQAARPPPAFADTVGVMEPFGMLDRFRFLRQRLDVELEVHAHDDFGLATANTLAAVMGGATHINTTVNGLGERAANAALEECVLALKNLHGIDTGIDTRGIPAISALVERASGRQWPGRRAWLAPVFTHEAGIHVDGLLKHRRNYEGLNPDELGRSHSLVLGKHSGAHMVRNSYRELGIELADWQSQALLGRIRAFSTRTKRSPQAAELEDFYRQLCEQGTAELAAGGMA

SEQ ID NO: 7093 - DNA, 1158 bp, Azotobacter vinelandii
  CDS (1)..(1158): transl_table=11
atggctagcgtgatcatcgacgacactaccctgcgtgacggtgaacagagtgccggggtcgccttcaatgccgacgagaagatcgctatcgcccgcgcgctcgccgaactgggcgtgccggagttggagatcggcattcccagcatgggcgaggaagagcgcgaggtgatgcacgccatcgccggtctcggcctgtcgtctcgcctgctggcctggtgccggctatgcgacgtcgatctcgcggcggcgcgctccaccggggtgaccatggtcgacctttcgctgccggtctccgacctgatgctgcaccacaagctcaatcgcgatcgcgactgggccttgcgcgaagtggccaggctggtcggcgaagcgcgcatggccgggctcgaggtgtgcctgggctgcgaggacgcctcgcgggcggatctggagttcgtcgtgcaggtgggcgaagtggcgcaggccgccggcgcccgtcggctgcgcttcgccgacaccgtcggggtcatggagcccttcggcatgctcgaccgcttccgtttcctcagccggcgcctggacatggagctggaagtgcacgcccacgatgatttcgggctggccacggccaacaccctggccgcggtgatgggcggggcgactcatatcaacaccacggtcaacgggctcggcgagcgtgccggcaacgccgcgctggaagagtgcgtgctggcgctcaagaacctccacggtatcgacaccggtatcgatacccgcggcatcccggccatctccgcgctggtcgagcgggcctcggggcgccaggtggcctggcagaagagcgtggtcggcgccggggtgttcactcacgaggccggtatccacgtcgacggactgctcaagcatcggcgcaactacgaggggctgaatcccgacgaactcggtcgcagccacagtctggtgctgggcaagcattccggggcgcacatggtgcgcaacacgtaccgcgatctgggtatcgagctggcggactggcagagccaagcgctgctcggccgcatccgtgccttctccaccaggaccaagcgccgcagcccgcagcctgccgagctgcaggatttctatcggcagttgtgcgagcaaggcaatcccgaactggccgcaggaggaatggcatga

SEQ ID NO: 7094 - protein, 385 aa, Azotobacter vinelandii
MASVIIDDTTLRDGEQSAGVAFNADEKIAIARALAELGVPELEIGIPSMGEEEREVMHAIAGLGLSSRLLAWCRLCDVDLAAARSTGVTMVDLSLPVSDLMLHHKLNRDRDWALREVARLVGEARMAGLEVCLGCEDASRADLEFVVQVGEVAQAAGARRLRFADTVGVMEPFGMLDRFRFLSRRLDMELEVHAHDDFGLATANTLAAVMGGATHINTTVNGLGERAGNAALEECVLALKNLHGIDTGIDTRGIPAISALVERASGRQVAWQKSVVGAGVFTHEAGIHVDGLLKHRRNYEGLNPDELGRSHSLVLGKHSGAHMVRNTYRDLGIELADWQSQALLGRIRAFSTRTKRRSPQPAELQDFYRQLCEQGNPELAAGGMA

SEQ ID NO: 7095 - DNA, 1203 bp, Enterobacter agglomerans
  CDS (1)..(1203): transl_table=11
atggcggcttcagaatcggaacggactggcggcggtaacaggcccatggcggtcataatcaacgacaccactttgcgtgatggcgaacaaagccccggcgtggcatttcgcgccagtgaaaaactggaaattgcccaggcgctggtgaatgccggtgtccgtgagctggaagcggggacaccggcgctcggcgaggaagagtgcgtgcggctggcgattttgcgcagacaactgccggacacggtgatgatgtcgtggtgccggatgaattcagcagaaattcacgattctgcgcgggtgggcatggactgggtagatatctcggtaccggcgtcagatttactgcgcgagcagaaactacatcggccatggcctgcggtgattgcctcacttaaaccgctggtgcagcttgcacaccgtctcggtatgcgggtgtgtatgggctgtgaggatgcctcgcgctccgccgatgaaactttgcacatgctggcggaagtggcggcggatctgggcatagaacggatgcggtttgccgatacgctgggcattctcgatcccttcagtacctttacccgtatttcggcattacgccagcactggcacggcgggttggaaatacatgcgcataacgatctgggtatggcaactgccaacacgctggcggcggtcagggcgggtgcgacgcatgtgaacactacggtgctcgggcttggcgaacgggcggggaatgcggcgctcgaaagcgtgaccttgtcactcgaccgttgcctgcatctcgactgtggtatcgatttcaccgaactgccggcgttgtgccgccttgtggctgctgcggcggggagaaccattgacgtgcagcatccgctggtcggcgggcaggttttcacccacgaatccggcttgcatgtggcggcactgctgcgcgacccgcgcagttatcagggcatcgatccctctctggtcgggcgggaatttaatctggtgcttggcaaacactcaggcaggcaggcggtgagcggcatctgcgcgcgtctggggtatatcctcagcgagacacaaaccctgttgatgttgcaggaggtgaaacgctttgccgaacatttcaaacgtaatccgggtgaggatgaagtgatcgccatgtgccagatgcggatggacgatcagatcccgttcgaaggacaacttcaggctcagggaggctga

SEQ ID NO: 7096 - protein, 400 aa, Enterobacter agglomerans
MAASESERTGGGNRPMAVIINDTTLRDGEQSPGVAFRASEKLEIAQALVNAGVRELEAGTPALGEEECVRLAILRRQLPDTVMMSWCRMNSAEIHDSARVGMDWVDISVPASDLLREQKLHRPWPAVIASLKPLVQLAHRLGMRVCMGCEDASRSADETLHMLAEVAADLGIERMRFADTLGILDPFSTFTRISALRQHWHGGLEIHAHNDLGMATANTLAAVRAGATHVNTTVLGLGERAGNAALESVTLSLDRCLHLDCGIDFTELPALCRLVAAAAGRTIDVQHPLVGGQVFTHESGLHVAALLRDPRSYQGIDPSLVGREFNLVLGKHSGRQAVSGICARLGYILSETQTLLMLQEVKRFAEHFKRNPGEDEVIAMCQMRMDDQIPFEGQLQAQGG

SEQ ID NO: 7097 - DNA, 1056 bp, Frankia alni
  CDS (1)..(1056): transl_table=11
gtgatgacagtgcgagacccccgttttcccagctcatctaccacggcgatacagtcggacgcggcgatcaaattctgcgacaccacgctccgcgacggcgagcaggcgcctggcgtcgcattcaccgcggccgagaaactcgccatcgccgctgccctggacgccatcggggtacaccagatcgaggccggaatcccggcgatgggtgtcaccgagcgggacgtgctgcgggagatcctcgcaaccgatccgcacgcggacatcgtgggctggtgccgggccgaccaccgcgacgtcgaggccgcggcaagctgcggcctcgtcaccgcgcacctgaccatcccggtctccgacttgcacctgaagagcaagttggggcgggatcgggcctgggcgcggctgcgggtccgcgactgtgtcgcggatgcgacggaccgcgggatgcgggtgagcgtcggtttcgaggacgcctcccgcgccgacgacgcgttcgtcacggacctggcgggcgaactgcgggaactgggcgtcaccaggctgcgctgggccgacaccgtcggcctgctcgacccggtgagcgcgcacgatcggctggggcgactggtcagggcggtcccggggccgtgggagatccacgcccacgacgacttcggcctggcgacggccaacaccatcgccgccgtccaggcggggttcacctgggtcagcaccaccgtgctcggcctgggcgaacgcgccgggaacgccccgatcgaagaggtcgcgatggcgcttcggcacctgctgaagctgcccgtcgacctggacacgacgtcgtttcgcagcctcgcccggctggtgtcgcgggccgcacgccggcccctgccggcgggcaaggcggtggtcggcgagtcggtgttcgcgcatgagtcgggcatccatgtgcacggcatcctgcgccacccggcgacgtacgagccgttcgaccccgccgaggtcggcgggcgccggcggctggcgatcggcaagcacagcgggcgggcctcggtgcgctacgcgctcgagcagtacggctga

SEQ ID NO: 7098 - protein, 351 aa, Frankia alni
MMTVRDPRFPSSSTTAIQSDAAIKFCDTTLRDGEQAPGVAFTAAEKLAIAAALDAIGVHQIEAGIPAMGVTERDVLREILATDPHADIVGWCRADHRDVEAAASCGLVTAHLTIPVSDLHLKSKLGRDRAWARLRVRDCVADATDRGMRVSVGFEDASRADDAFVTDLAGELRELGVTRLRWADTVGLLDPVSAHDRLGRLVRAVPGPWEIHAHDDFGLATANTIAAVQAGFTWVSTTVLGLGERAGNAPIEEVAMALRHLLKLPVDLDTTSFRSLARLVSRAARRPLPAGKAVVGESVFAHESGIHVHGILRHPATYEPFDPAEVGGRRRLAIGKHSGRASVRYALEQYG

SEQ ID NO: 7099 - DNA, 1146 bp, Klebsiella pneumoniae
  CDS (1)..(1146): transl_table=11
atggaacgcgtgctgattaacgataccaccctgcgcgacggcgagcagagccccggcgtcgcctttcgcaccagcgaaaaggtcgccattgccgaggcgctttacgccgcaggaataacggcgatggaggtcggcaccccggcgatgggcgacgaggagatcgcgcggatccagctggtgcgtcgccagctgcccgacgcgaccctgatgacctggtgtcggatgaacgcgctggagatccgccagagcgccgatctgggcatcgactgggtggatatctcgattccggcttcggataagctgcggcagtacaaactgcgcgagccgctggcggtgctgctggagcggctggcgatgtttatccatcttgcgcataccctcggcctgaaggtatgcatcggctgcgaggacgcctcgcgggccagcggccagaccctgcgcgctatcgccgaggtcgcgcagaatgcgccggccgcccgcctgcgctatgccgatacggtcggcctgctcgacccttttaccaccgcggcgcaaatctcggccctgcgcgacgtctggtccggcgaaatcgaaatgcatgcccataacgatctgggtatggcgaccgccaatacgctggcggcggtaagcgccggggccaccagcgtgaatacgacggtcctcggtctcggcgagcgggcgggcaacgcggccgcatggaaaccgtccgcgctgggccttgaacgctgcctgggcgtggagaccggcgtgcatttttcggcgctgcccgcgctctgtcagagggtcgcggaagccgcgcagcgcgccatcgacccgcagcagccgctggtcggcgagctggtgtttacccatgagtcaggtgtccacgtggcggcgctgctgcgcgacagcgagagctaccagtccatcgccccttccctgatgggccgcagctaccggctggtgctgggcaaacactccgggcgtcaggcggtcaacggcgtttttgaccagatgggctatcacctcaacgccgcgcagattaaccagctgctgcccgccatccgccgcttcgccgagaactggaagcgcagcccgaaagattacgagctggtggctatctacgacgagctgtgcggtgaatccgctctgcgggcgagggggtaa

SEQ ID NO: 7100 - protein, 381 aa, Klebsiella pneumoniae
MERVLINDTTLRDGEQSPGVAFRTSEKVAIAEALYAAGITAMEVGTPAMGDEEIARIQLVRRQLPDATLMTWCRMNALEIRQSADLGIDWVDISIPASDKLRQYKLREPLAVLLERLAMFIHLAHTLGLKVCIGCEDASRASGQTLRAIAEVAQNAPAARLRYADTVGLLDPFTTAAQISALRDVWSGEIEMHAHNDLGMATANTLAAVSAGATSVNTTVLGLGERAGNAAAWKPSALGLERCLGVETGVHFSALPALCQRVAEAAQRAIDPQQPLVGELVFTHESGVHVAALLRDSESYQSIAPSLMGRSYRLVLGKHSGRQAVNGVFDQMGYHLNAAQINQLLPAIRRFAENWKRSPKDYELVAIYDELCGESALRARG

SEQ ID NO: 7101 - DNA, 1149 bp, Rhodobacter capsulatus
  CDS (1)..(1149): transl_table=11
atgacacccgaccgaacgcttgcgctttgcgacaccaccctgcgcgacggcgaacagaccgccggggtggccttttccttggccgaaaagaaggccatcgcccgggcgctggaccgggcgggcgtggcggagatcgaggtcggcatcgccgcgatgggctgggccgaggtcgccgaaatccgcgccgtcgtcgccgaaatcgcccatgcgacgcctgtcgtctggtgtcggctgcggatgcatgatctggacatggcgcagaaaaccggggtcaagcgggtgcatttcgcggtgcccacctccaccgcgcagctggagggcaagctgcgcgtcgatcgcgactggatcttgcgcgagaccgcggctttggtcttttgcgccagtgatcgcggcctgcaggtctcggtcggcgccgaggatgccagccgcaccgatcccgacttcctgatccgtctggccgaggtcgccgccgccgcgggcgccatccggttccgcatcgccgacacgcttggcttgctggatccgctgggcgcgtttcggcttgtggccgagctttcggcgcggatctccctgccgatcgagatgcatgcccacaatgatttcggcatggcgacggcgaatacgatcatggccgcccatgccggggcgacgcatctgtcggtcacggtgaacgggctgggcgaacgcgcgggcaatgccgcgtgcgaagaggtcggcgccgcgctggaagccggggggatcgacaccgggcttgatctttgcgcgctgcccgaactttccgccgtcgtcgccaaggcctcgggccgcgcgttccgcgcacaaaagccgatcaccggggacgactggctctttgcgcatgaatccggcatccatgtcgatgcgatcctcaaacgcgccgacacctacgaagacccgcgctgcgcccccgcccgctttggccgcgaacggcagatcgtgatcggcaagcattcgggcagcgccggtctgcgcgccgccctgctggaggcgggcctgcccgccgacgatgccgtgctcgaccggctgaagccgctgttgcgcgcccatgccgtgcgggtgaaacgccccgtcgaggccggggatctgcgccgcatggtggcgcggctcgcccgcccgtcgccccgaacctga

SEQ ID NO: 7102 - protein, 382 aa, Rhodobacter capsulatus
MTPDRTLALCDTTLRDGEQTAGVAFSLAEKKAIARALDRAGVAEIEVGIAAMGWAEVAEIRAVVAEIAHATPVVWCRLRMHDLDMAQKTGVKRVHFAVPTSTAQLEGKLRVDRDWILRETAALVFCASDRGLQVSVGAEDASRTDPDFLIRLAEVAAAAGAIRFRIADTLGLLDPLGAFRLVAELSARISLPIEMHAHNDFGMATANTIMAAHAGATHLSVTVNGLGERAGNAACEEVGAALEAGGIDTGLDLCALPELSAVVAKASGRAFRAQKPITGDDWLFAHESGIHVDAILKRADTYEDPRCAPARFGRERQIVIGKHSGSAGLRAALLEAGLPADDAVLDRLKPLLRAHAVRVKRPVEAGDLRRMVARLARPSPRT

SEQ ID NO: 7103 - DNA, 1176 bp, Rhodobacter sphaeroides
  CDS (1)..(1176): transl_table=11
atgtcgcgccagcagccgcgggcgagcttcctgcccgaaagcccgctcgcccccgtggccctctgcgacacgacgctgcgcgacggagagcagacggcgggcgtggccttcacccgcgccgagaagcgggccatcgccgaggcgctgcaggccgcaggcgtggccgaggtcgaggtgggcgtgcccgccatgggcgaggaagagcgggccgacatccgcgcggtggcggcggtgctgaagacggcggcgcccgtcgtctggtgccgcctgcgcgccgaggatctggcggccgcgcagcgcacgggcgtcgtgcggctccatatcggcgtccccgtctccgagcgccagatcagtgccaagctcggcaaggacgcggcctgggtgcgcgacaaggtcgagaagctcgtgcgcgccgcttcctgggccggtcacaaggtgtcggtgggggccgaggatgcctcgcgcgccgatccgttctttctggccgagatcgcccatgtcgcggccgaggcgggcgcgatccgcttccgcatctcggacacgctgggcgtgctcgacccgttcgctgcgcacgaactggtgggccgcgtcgtcacgcgctgcccgctgccggtggagttccacggccacaacgatctgggcatggccacggccaacagcctcgccgccgcgcgcgccggggcctcgcacctgtcggtcacggtgaacgggctgggcgagcgggcgggcaatgccgcgctcgaggaggtggcggccgcgctcgaagcggcgggccgcgccaccggcgtcgcgctgggccagctctgcgccctctcggagctggtggcccgcgcctcgggacggccgctctcgccgcagaagcccatcgtgggcgagggggtcttcacccatgaatgcggcatccatgtcgacgggctgatgaaggaccgcgccacctacgagagcgcggacctgcgccccgagcggttcggccgcagccaccgcatcgccatcggcaagcattcctcggccgccgggctcgcccgggcgctggccgaggcggggcttcccgccgacgcggcgacgctcgcggccctgatgcccgcgctgcgcgactgggcggccatcaccaagcgcgcggccgcccccgaggatcttgcggcgctccttgccgcgcaaaccgaaaccgcccgttga

SEQ ID NO: 7104 - protein, 391 aa, Rhodobacter sphaeroides
MSRQQPRASFLPESPLAPVALCDTTLRDGEQTAGVAFTRAEKRAIAEALQAAGVAEVEVGVPAMGEEERADIRAVAAVLKTAAPVVWCRLRAEDLAAAQRTGVVRLHIGVPVSERQISAKLGKDAAWVRDKVEKLVRAASWAGHKVSVGAEDASRADPFFLAEIAHVAAEAGAIRFRISDTLGVLDPFAAHELVGRVVTRCPLPVEFHGHNDLGMATANSLAAARAGASHLSVTVNGLGERAGNAALEEVAAALEAAGRATGVALGQLCALSELVARASGRPLSPQKPIVGEGVFTHECGIHVDGLMKDRATYESADLRPERFGRSHRIAIGKHSSAAGLARALAEAGLPADAATLAALMPALRDWAAITKRAAAPEDLAALLAAQTETAR

SEQ ID NO: 7105 - DNA, 1908 bp, Oryza sativa
  CDS (1)..(1908)
atggcctcctccctcctctcctccccaaaaccctcctccttctcctccgcaaaccccacctccactccacgcccacgcgcccaaactctctcccccttccgcgccgccgccccacgcttctcccatggcctcgccaccgccgccgccgccgcaaaccctagcgcctcccgccgctgctaccaccgcgccttcgcccgccccgtccgggcgtccatggcgcagccgcggcgcccggagtacgtccccaaccgcatcgacgaccccaactacgtccgcatcttcgacaccaccctccgcgacggggagcagtcccccggggccaccatgaccagcgccgagaagctcgtcgtcgcgcgccagctcgcccgcctcggcgtcgacatcatcgaggccgggttcccggcctcctcccccgacgacctcgacgccgtgcgctccatcgccatcgaggtcgggaacacgcccgtcggggaggacggccacgtgccggtcatctgtggcctctcgagatgcaataagcgagacattgatgctgcctgggaggccgtgcggcacgcgcggcggccgcgcatccacaccttcattgccaccagcgagatccatatgcagcacaagctaaggaagacgcccgagcaggtggtggccattgccaaggaaatggtggcctacgcccgcagcctaggctgccctgatgtcgagttcagccctgaagacgctggcaggtcaaacagagagtttctatatcatattctagaggaagtcataaaagctggagcaacaacactcaatatcccagacactgttggatacactcttccttatgaatttgggaagctaattgctgatataaaagcaaacactccaggaattgaaaatgctattatttctactcattgccagaatgaccttggtctagcaaccgccaatacattagcgggcgctcatgcaggagcacggcaattagaggtgactatcaacggtattggtgaaagggctggaaatgcttctttggaagaggttgtgatggcaattaaatgtcgccgagagctcttaggaggtctgtatactggaatcaatacccaacatatcactatgtcaagcaaaatggtacaagagcacagtggacttcatgtacaaccacataaagctattgtcggtgccaatgcctttgcacatgaaagtggaattcatcaggatgggatgcttaaatacaaaggaacttatgaaataatttctcctgatgatattggtctaacacgtgcaaacgagtttggtattgttcttgggaaactcagtggaaggcatgctgtgagatctaaactagtggagcttggatatgaaatcactgacaaggaatttgaggatttctttaaacgctacaaagaggttgcagagaagaaaaagcgtgtaactgatgaagacattgaggcgctgttgtctgatgagatatttcagcccaaggttttttggtcccttgctgatgtacaggcaacttgtggaacacttggtctgtctacagcaactgtcaaactgataggtccggatggagaggagaagattgcatgtgcagttggaacaggtccagttgatgcagcttacaaggctgttgatgatataatacagatcccaactgttcttcgagaatatagcatgacatcggtcacagaaggcattgatgcaattgcaactactagagtggttgtcactggagatgttagcgactctaaacatgctttgactggtcactccttcagccgggcattcagtgggagtggtgccgcactggatattgttgtttccagtgtgcgagcttacctgagtgccctgaacaagatgtccagttttgttggggctatcaaggctagtagtgaagtatctgaaagccaaagagttcaaaccacagaatga

SEQ ID NO: 7106 - protein, 635 aa, Oryza sativa
MASSLLSSPKPSSFSSANPTSTPRPRAQTLSPFRAAAPRFSHGLATAAAAANPSASRRCYHRAFARPVRASMAQPRRPEYVPNRIDDPNYVRIFDTTLRDGEQSPGATMTSAEKLVVARQLARLGVDIIEAGFPASSPDDLDAVRSIAIEVGNTPVGEDGHVPVICGLSRCNKRDIDAAWEAVRHARRPRIHTFIATSEIHMQHKLRKTPEQVVAIAKEMVAYARSLGCPDVEFSPEDAGRSNREFLYHILEEVIKAGATTLNIPDTVGYTLPYEFGKLIADIKANTPGIENAIISTHCQNDLGLATANTLAGAHAGARQLEVTINGIGERAGNASLEEVVMAIKCRRELLGGLYTGINTQHITMSSKMVQEHSGLHVQPHKAIVGANAFAHESGIHQDGMLKYKGTYEIISPDDIGLTRANEFGIVLGKLSGRHAVRSKLVELGYEITDKEFEDFFKRYKEVAEKKKRVTDEDIEALLSDEIFQPKVFWSLADVQATCGTLGLSTATVKLIGPDGEEKIACAVGTGPVDAAYKAVDDIIQIPTVLREYSMTSVTEGIDAIATTRVVVTGDVSDSKHALTGHSFSRAFSGSGAALDIVVSSVRAYLSALNKMSSFVGAIKASSEVSESQRVQTTE

SEQ ID NO: 7107 - DNA, 1908 bp, Oryza sativa
  CDS (1)..(1908)
atggcctcctccctcctctcctccccaaaaccctcctccttctcctccgcaaaccccacctccactccacgcccacgcgcccaaactctctcccccttccgcgccgccgccccacgcttctcccatggcctcgccaccgccgccgccgccgcaaaccctagcgcctcccgccgctgctaccaccgcgccttcgcccgccccgtccgggcgtccatggcgcagccgcggcgcccggagtacgtccccaaccgcatcgacgaccccaactacgtccgcatcttcgacaccaccctccgcgacggggagcagtcccccggggccaccatgaccagcgccgagaagctcgtcgtcgcgcgccagctcgcccgcctcggcgtcgacatcatcgaggccgggttcccggcctcctcccccgacgacctcgacgccgtgcgctccatcgccatcgaggtcgggaacacgcccgtcggggaggacggccacgtgccggtcatctgtggcctctcgagatgcaataagcgagacattgatgctgcctgggaggccgtgcggcacgcgcggcggccgcgcatccacaccttcattgccaccagcgagatccatatgcagcacaagctaaggaagacgcccgagcaggtggtggccattgccaaggaaatggtggcctacgcccgcagcctaggctgccctgatgtcgagttcagccctgaagacgctggcaggtcaaacagagagtttctatatcatatactagaggaagtcataaaagctggagcaacaacactcaatatcccagacactgttggatacactcttccttatgaatttgggaaactaattgctgatataaaagcaaacactccaggaattgaaaatgccattatttctactcattgccagaatgaccttggtctagcaaccgcaaatacattagcgggcgctcatgcaggagcacggcaattagaggtgactatcaatggtattggtgaaagggctggaaatgcttctttggaagaggttgtgatggcaattaaatgtcgtcgagaactcttaggaggtctgtatactggaatcaatacccaacatatcactatgtcaagcaaaatggtacaagagcacagtggacttcatgtacaaccacataaagctattgtcggtgccaatgcctttgcacatgaaagtggaattcatcaggatgggatgcttaagtacaaaggaacttatgaaataatttctcctgatgatattggtctaacacgtgcaaatgagtttggtattgttcttgggaagctcagtggaaggcatgctgtgagatctaaactagtggagcttggatatgaaatcactgacaaggaatttgaggatttctttaaacgctacaaagaggttgcagagaagaaaaagcgtgtaactgatgaagacattgaggcgctgttgtctgatgagatatttcagcccaaggttttttggtcccttgctgatgtacaggcaacttgtggaacacttggtctgtctacagcaactgtcaaactgataggtccggatggagatgagaagattgcatgtgcagttggaacaggtccagttgatgcagcttacaaggctgttgatgatataatacagatcccaactgttcttcgagaatatagcatgacatcggtcacagaaggcattgatgcaattgcaactactagagtggttgtcactggagatgtcagcgactctaaacatgctttgactggtcactccttcaaccgggcattcagtgggagtggtgccgcactggatattgttgtttccagtgtgcgagcttacctgagtgccctgaacaagatgtccagttttgttggggctatcaaggctagtagtgaagtatctgaaagccaaagagttcaaaccacagaatga

SEQ ID NO: 7108 - protein, 635 aa, Oryza sativa
MASSLLSSPKPSSFSSANPTSTPRPRAQTLSPFRAAAPRFSHGLATAAAAANPSASRRCYHRAFARPVRASMAQPRRPEYVPNRIDDPNYVRIFDTTLRDGEQSPGATMTSAEKLVVARQLARLGVDIIEAGFPASSPDDLDAVRSIAIEVGNTPVGEDGHVPVICGLSRCNKRDIDAAWEAVRHARRPRIHTFIATSEIHMQHKLRKTPEQVVAIAKEMVAYARSLGCPDVEFSPEDAGRSNREFLYHILEEVIKAGATTLNIPDTVGYTLPYEFGKLIADIKANTPGIENAIISTHCQNDLGLATANTLAGAHAGARQLEVTINGIGERAGNASLEEVVMAIKCRRELLGGLYTGINTQHITMSSKMVQEHSGLHVQPHKAIVGANAFAHESGIHQDGMLKYKGTYEIISPDDIGLTRANEFGIVLGKLSGRHAVRSKLVELGYEITDKEFEDFFKRYKEVAEKKKRVTDEDIEALLSDEIFQPKVFWSLADVQATCGTLGLSTATVKLIGPDGDEKIACAVGTGPVDAAYKAVDDIIQIPTVLREYSMTSVTEGIDAIATTRVVVTGDVSDSKHALTGHSFNRAFSGSGAALDIVVSSVRAYLSALNKMSSFVGAIKASSEVSESQRVQTTE

SEQ ID NO: 7109 - DNA, 1770 bp, Oryza sativa
  CDS (1)..(1770)
atggcctcctccctcctctcctccccaaaaccctcctccttctcctccgcaaaccccacctccactccacgcccacgcgcccaaactctctcccccttccgcgccgccgccccacgcttctcccatggcctcgccaccgccgccgccgccgcaaaccctagcgcctcccgccgctgctaccaccgcgccttcgcccgccccgtccgggcgtccatggcgcagccgcggcgcccggagtacgtccccaaccgcatcgacgaccccaactacgtccgcatcttcgacaccaccctccgcgacggggagcagtcccccggggccaccatgaccagcgccgagaagctcgtcgtcgcgcgccagctcgcccgcctcggcgtcgacatcatcgaggccgggttcccggcctcctcccccgacgacctcgacgccgtgcgctccatcgccatcgaggtcgggaacacgcccgtcggggaggacggccacgtgccggtcatctgtggcctctcgagatgcaataagcgagacattgatgctgcctgggaggccgtgcggcacgcgcggcggccgcgcatccacaccttcattgccaccagcgagatccatatgcagcacaagctaaggaagacgcccgagcaggtggtggccattgccaaggaaatggtggcctacgcccgcagcctaggctgccctgatgtcgagttcagccctgaagacgctggcaggtcaaacagagagtttctatatcatatactagaggaagtcataaaagctggagcaacaacactcaatatcccagacactgttggatacactcttccttatgaatttgggaaactaattgctgatataaaagcaaacactccaggaattgaaaatgccattatttctactcattgccagaatgaccttggtctagcaaccgcaaatacattagcgggcgctcatgcaggagcacggcaattagaggtgactatcaatggtattggtgaaagggctggaaatgcttctttggaagaggttgtgatggcaattaaatgtcgtcgagaactcttaggaggtctgtatactggaatcaatacccaacatatcactatgtcaagcaaaatggtacaagagcacagtggacttcatgtacaaccacataaagctattgtcggtgccaatgcctttgcacatgaaagtggaattcatcaggatgggatgcttaagtacaaaggaacttatgaaataatttctcctgatgatattggtctaacacgtgcaaatgagtttggtattgttcttgggaagctcagtggaaggcatgctgtgagatctaaactagtggagcttggatatgaaatcactgacaaggaatttgaggatttctttaaacgctacaaagaggttgcagagaagaaaaagcgtgtaactgatgaagacattgaggcgctgttgtctgatgagatatttcagcccaaggttttttggtcccttgctgatgtacaggcaacttgtggaacacttggtctgtctacagcaactgtcaaactgataggtccggatggagatgagaagattgcatgtgcagttggaacaggtccagttgatgcagcttacaaggctgttgatgatataatacagatcccaactgttcttcgagaatatagcatgacatcggtcacagaaggcattgatgcaattgcaactactagagtggttgtcactggagatgtcagcgactctaaacatgctttgactggtcactccttcaaccgggcattcaggtaa

SEQ ID NO: 7110 - protein, 589 aa, Oryza sativa
MASSLLSSPKPSSFSSANPTSTPRPRAQTLSPFRAAAPRFSHGLATAAAAANPSASRRCYHRAFARPVRASMAQPRRPEYVPNRIDDPNYVRIFDTTLRDGEQSPGATMTSAEKLVVARQLARLGVDIIEAGFPASSPDDLDAVRSIAIEVGNTPVGEDGHVPVICGLSRCNKRDIDAAWEAVRHARRPRIHTFIATSEIHMQHKLRKTPEQVVAIAKEMVAYARSLGCPDVEFSPEDAGRSNREFLYHILEEVIKAGATTLNIPDTVGYTLPYEFGKLIADIKANTPGIENAIISTHCQNDLGLATANTLAGAHAGARQLEVTINGIGERAGNASLEEVVMAIKCRRELLGGLYTGINTQHITMSSKMVQEHSGLHVQPHKAIVGANAFAHESGIHQDGMLKYKGTYEIISPDDIGLTRANEFGIVLGKLSGRHAVRSKLVELGYEITDKEFEDFFKRYKEVAEKKKRVTDEDIEALLSDEIFQPKVFWSLADVQATCGTLGLSTATVKLIGPDGDEKIACAVGTGPVDAAYKAVDDIIQIPTVLREYSMTSVTEGIDAIATTRVVVTGDVSDSKHALTGHSFNRAFR

SEQ ID NO: 7111 - DNA, 1518 bp, Brassica napus
  CDS (1)..(1518)
atggcatcgtcacttctgacatcttccggaattatccctaccaccagttccaacatggttgtccggtcattcttaccctttggatctgtccgcctgacccgtccgtacaacaagtcgtccttgctcatctcatgttgctcctctgtgtccaagaaggctgagactagtggtactgacctcaaaaccgttgtggaacggtggccagagtatattccgaacaagctccccgacaagaactacgtgcgtgtatttgatacgacgctccgtgacggcgaacaatctcccggtgcagcccttactccaccgcagaagatagagattgcccggcagctcgctaaactcagagtagacatcatggaagttggttttcccgtgtcatcagaggaagagttcgaaaccatcaaaaccatcgccaaaaccgtgggaaacgaggttgatgaggaaacaggttatatcccagtgatatgcgtcatcgcacgaagcaaagaaagagatataaaggcggcttgggagtcagtgaagtacgcaaagaggccgaggatagtcatattcacttctactagtgacattcacttgaaatataagttgaaaatgactagagaagaagtcgtcgagatggtcgcgagtagcattaggtttgctaaaagtttaggcttcgaagacatcgagtttggttgcgaagatggcggcaggtccgacaaggattatatatgcaaggtttttgaagaagcgatcaaagcgggtgcaaccaccctggcctgcccggacacggtggggatcaacatgccgcacgaatacgggaaacttgtgagatacatcaaagcaaacactcctggaattgatgatgttatcttcagcgctcattgtcacaatgaccttggtgttgctaccgccaacacaatcgccggtatatgtgcgggagcacgacaagtcgaagtaacaatcaatggaataggtgaaagaagtgggaatgcaccgcttgaagaggtcgtgatggctttgaaatgtcgaggagcatttgtgatgggtggtgtttacacaagaatagacacacgccaaattatggctaccagcaagatggttcaagaatatactggcttgtatgttcagccacataaacctatagttggagccaactgttttgttcatgagagcggcattcaccaggatgggatattgaaaaatcggagtacatatgagatcttatcaccagaagatgttggagttgtaaaatctcaaaattcaggcattgttcttggaaagcttagtggacgtcatgcggttaaaggtcgtctgaaagagttgggatatggaatcagtgatgagaaactgaacgaggttttctcacggttcagagatttaaccaagcagaaaaagagagtcacggatgatgatctaagggcattagtaacgtgtggtgatgaaatcttctcctcagagaaattaaacggcactaacgacaacgaaatcaacagaaacggctatgtaccgtctcctcagatttcctctgtggtatga

SEQ ID NO: 7112 - protein, 505 aa, Brassica napus
MASSLLTSSGIIPTTSSNMVVRSFLPFGSVRLTRPYNKSSLLISCCSSVSKKAETSGTDLKTVVERWPEYIPNKLPDKNYVRVFDTTLRDGEQSPGAALTPPQKIEIARQLAKLRVDIMEVGFPVSSEEEFETIKTIAKTVGNEVDEETGYIPVICVIARSKERDIKAAWESVKYAKRPRIVIFTSTSDIHLKYKLKMTREEVVEMVASSIRFAKSLGFEDIEFGCEDGGRSDKDYICKVFEEAIKAGATTLACPDTVGINMPHEYGKLVRYIKANTPGIDDVIFSAHCHNDLGVATANTIAGICAGARQVEVTINGIGERSGNAPLEEVVMALKCRGAFVMGGVYTRIDTRQIMATSKMVQEYTGLYVQPHKPIVGANCFVHESGIHQDGILKNRSTYEILSPEDVGVVKSQNSGIVLGKLSGRHAVKGRLKELGYGISDEKLNEVFSRFRDLTKQKKRVTDDDLRALVTCGDEIFSSEKLNGTNDNEINRNGYVPSPQISSVV

SEQ ID NO: 7113 - DNA, 1881 bp, Zea mays
  CDS (1)..(1881)
atggcgtcctcgctgctctcctcccccgctaaacccaccatcaccaccaccaccaaaacgaccccggccccaagacccgcccgctccgcccatgtccatgtcctctccgccgcccgctgcctccgcctccgcctccgcgcgtcgtcgcagcatcctccgcctccgcccaccccgcggtcgcggcggccggattacgtcccgaaccgcatcgacgaccccaactacgtgcgcatcttcgacaccacgctgcgcgacggggagcagtcgccgggcgccaccatgacgagcgcccagaagctcgtcgtcgcgcgccagctggcccgcctcggcgtcgacatcatcgaggccgggttcccggcctcctcccccgacgacctcgacgccgtgcgctccatcgccatcgaggtcggcaacccggcgccaggacccgccggggaggaggacgccgtccacgtgccggtcatctgcggcctctcgcggtgcaaccggaaggacatcgacgccgcgtgggaggccgtgcgccacgcgcgccgcccccggatccacaccttcatcgccaccagcgacattcacatgcagcataagctcaggaagacgcccgaccaggtggtcgccattgccagggagatggtggcctacgcccgcagcctcggatgcactgacgtcgagttcagccccgaggacgccggcaggtcaaatagagagttcttgtatcatattctaggggaagtcataaaagctggagctacgactctcaatatcccggacactgtcggatacaatcttccttatgaatttggaaagttgattgctgatataaaggcaaacactcctggaattgaaaaggctatcatttccactcattgtcagaatgaccttggtcttgcgactgccaacacactagcgggcgctcgtgcaggagcacggcagttagaggttactattaatggtattggtgaaagggctggaaatgcttctttggaggaggttgtcatggcaattaaatgccgcagagaactgttagatggtctctatactggaatcgattcccgacatatcactttgacgagcaaaatggtgcaagagcatagtggacttcacgtgcagccacataaagctattgttggtgccaatgcgttcgctcatgaaagtggaattcatcaggatgggatgcttaaatataaaggaacatacgaaattatatcgcctgatgatattagtctaacacgtgcaaatgaatttggtattgttcttgggaaactcagcggaaggcatgctgtgagatctaagctagtagagcttggatatgaaatcggtgacaaggaatttgaggacttctttaaacgctacaaagaggttgcagagaagaaaaagcgcgtaactgatgaagacttagaagcgttattgtcagatgagatattccagcctaaggttatttggtcccttgctgatgtacaggcaacatgtggtacacttgctttatctacggcaacagtgaaattggtagcaccagatggagaggagaaaatagcatgttcagtcggaacaggtccagtcgatgcagcttacaaggctgttgacaaaataatccagattccaacggttctccgagaatacagtatgacatcagtcacagaaggcattgacgcaatcgcgacaactcgggttgttgtcactggagatgtgagcaacaacgccaaacatgccctgactggccagtccttcaaccgctccttcagcgggagcggggcatccatggacattgtggtgtccagtgtcagagcttacctgagcgccctgaacaagatctgcagtttcgctggcgccgtgaaagccagcagcgatgtagctgagaccgcaagcgtcccgagcacagaatga

SEQ ID NO: 7114 - protein, 626 aa, Zea mays
MASSLLSSPAKPTITTTTKTTPAPRPARSAHVHVLSAARCLRLRLRASSQHPPPPPTPRSRRPDYVPNRIDDPNYVRIFDTTLRDGEQSPGATMTSAQKLVVARQLARLGVDIIEAGFPASSPDDLDAVRSIAIEVGNPAPGPAGEEDAVHVPVICGLSRCNRKDIDAAWEAVRHARRPRIHTFIATSDIHMQHKLRKTPDQVVAIAREMVAYARSLGCTDVEFSPEDAGRSNREFLYHILGEVIKAGATTLNIPDTVGYNLPYEFGKLIADIKANTPGIEKAIISTHCQNDLGLATANTLAGARAGARQLEVTINGIGERAGNASLEEVVMAIKCRRELLDGLYTGIDSRHITLTSKMVQEHSGLHVQPHKAIVGANAFAHESGIHQDGMLKYKGTYEIISPDDISLTRANEFGIVLGKLSGRHAVRSKLVELGYEIGDKEFEDFFKRYKEVAEKKKRVTDEDLEALLSDEIFQPKVIWSLADVQATCGTLALSTATVKLVAPDGEEKIACSVGTGPVDAAYKAVDKIIQIPTVLREYSMTSVTEGIDAIATTRVVVTGDVSNNAKHALTGQSFNRSFSGSGASMDIVVSSVRAYLSALNKICSFAGAVKASSDVAETASVPSTE

SEQ ID NO: 7115 - DNA, 1518 bp, Brassica napus
  CDS (1)..(1518)
atggcatcgtcacttctgacatcttccggaattatccctaccaccagttccaacatggttgtccggtcattcttaccctttggatctgtccgcctgacccgtccgtacaacaagtcgtccttgctcatctcatgttgctcctctgtgtccaagaaggctgagactagtggtactgacctcaaaaccgttgtggaacggtggccagagtatattccgaacaagctccccgacaagaactacgtgcgtgtatttgatacgacgctccgtgacggcgaacaatctcccggtgcagcccttactccaccgcagaagatagagattgcccggcagctcgctaaactcagagtagacatcatggaagttggttttcccgtgtcatcagaggaagagttcgaaaccatcaaaaccatcgccaaaaccgtgggaaacgaggttgatgaggaaacaggttatatcccagtgatatgcgccatcgcacgaagcaaacaaagagacataaaggcggcttgggaagcagtgaagtacgcaaagaggccgaggatagtcatattcacttctactagtgacattcacatgaaatataagttgaaaaagactagagaagaagtcatcgagatggccgcgagtagcattaggtttgctaaaagcttaggcttcgaagacatccaatttggctgcgaagatggcggcaggtcggacaaggattatatatgcaagattctagaagaagcgatcaaagcgggtgcaaccaccctgaactgcccggacacggtagggatcaacatgccgcaagaatacggaaaacttgtgagatacatcaaagcaaacactcctggaattgatgatgttatcttcagcgctcattgtcacaacgaccttggtgttgctaccgccaacacaatcgccggtatatgtgcgggagcacgacaagtcgaagtaacaatcaacggaataggtgaaagaagtgggaatgcaccgcttgaagaggtcgtgatggctttgaaatgtcgaggagcatttgtgatggatggtgtttacacaagaatagacacacgccaaattatggctaccagcaagatggttcaagaatatactggcttgtatgttcaaccacataaacccatagttggagccaactgttttgttcatgagagcggcattcaccaggatgggatattgaaaaatcggagtacatatgagatcttatcaccagaagatgttggagttgtaaaatctcaaaattcaggcattgttcttggaaagcttagtggacgtcatgcggttaaaggtcgtctgaaagagttgggatatggaatcagtgatgagaaactgaacgaggttttctcacggttcagagatttaaccaagcagaaaaagagagtcacggatgatgatctaagggcattagtaacgtgtggtgatgaaatcttctcctcagagaaattaaacggcactaacgacaacgaaatcaacagaaacggctatgtaccgtctcctcagatttcctctgtggtatga

SEQ ID NO: 7116 - protein, 505 aa, Brassica napus
MASSLLTSSGIIPTTSSNMVVRSFLPFGSVRLTRPYNKSSLLISCCSSVSKKAETSGTDLKTVVERWPEYIPNKLPDKNYVRVFDTTLRDGEQSPGAALTPPQKIEIARQLAKLRVDIMEVGFPVSSEEEFETIKTIAKTVGNEVDEETGYIPVICAIARSKQRDIKAAWEAVKYAKRPRIVIFTSTSDIHMKYKLKKTREEVIEMAASSIRFAKSLGFEDIQFGCEDGGRSDKDYICKILEEAIKAGATTLNCPDTVGINMPQEYGKLVRYIKANTPGIDDVIFSAHCHNDLGVATANTIAGICAGARQVEVTINGIGERSGNAPLEEVVMALKCRGAFVMDGVYTRIDTRQIMATSKMVQEYTGLYVQPHKPIVGANCFVHESGIHQDGILKNRSTYEILSPEDVGVVKSQNSGIVLGKLSGRHAVKGRLKELGYGISDEKLNEVFSRFRDLTKQKKRVTDDDLRALVTCGDEIFSSEKLNGTNDNEINRNGYVPSPQISSVV

SEQ ID NO: 7117 - DNA, 1875 bp, Glycine max
  CDS (1)..(1875)
atggccaccgtgatccgcaatcctatcctctttccctccacctctcaccgccccaaccaaaaccacagcaacaacacattcctcattttccgcttccctcaaacctcacgctcttctctccactccaaatcccgattcgccttttcctgctcccaatcggagcctcctcctccttctccttctgcttctcctcgacggcgtcctccgtacatcccgaaccgcattcctgacccttcctatgtccgcattttcgacaccactctccgcgacggcgagcagtccccgggcgcctccatgacctccaaggagaagctggatgtggcgcggcagcttgccaagctcggcgtcgacatcatcgaggccggcttccctgccgcctccaaggatgacttcgaggccgtcaaaatgatcgcccaagaggtcggcaacgccgttgacgacgacggatacgtccccgtcatctgtggcctctcccgctgcaacgagaaggacattcgaacagcctgggaggccgtcaagtacgccaagaggcccaggattcacaccttcatcgccaccagcgccattcacatggagtacaagttgagaatgtccaaagacaaggtcgtcgacattgcccgcaatatggtcaagttcgctcgtagtttgggctgcgaagacgtcgagttcagtcctgaagatgctggaaggtcggatagggagtttctttatgaaattcttggagaagttattaaggccggcgccaccacgctcaacatacctgacactgttggtataaccatgcccagtgaatttggaaagttgattgctgatattaaagctaatacccctggaattgaaaatgttattatttccacccactgccagaatgatctcggactttctactgcaaacactatagagggtgcgcgtgccggtgcaaggcaactggaagtgacgattaatgggattggtgaaagggctggaaatgcctccctagaagaggttgtgatggccttgagatgcggagcacatgtcaatggcaatctctacactggaattaatacaaagcacatctttctgacgagcaagatggtcgaagagtacactggtttgcagatacagccacacaaggctcttgtgggagctaatgccttcgcccatgaaagtggcatacatcaggatggaatgctaaaacacaaaggtacatatgaaataatatcacccgaggacatcggacttgaaagaaccaatgaagcaggtattgtactggggaagcttagtggtcgccatgctttgagaaagcgacttgaagagcttggttatgaacttaatgacgaccaagttcagactttattttggtgttttaaagcagtggctgagcaaaaaaagagggttactgatgctgacctcagagcattggtatcagatgaagtttttcaagcagagcctgtctggaaacttggtgatttgcaggtgacttgtggaactcttggcctttctacagcaactgtcaaacttttgagtagtgatggtagcacacacgttgcctgttccattggtacaggaccagtggattcggcttacaaggctgttgatctgattgtgaaggagcaagtaacacttcttgagtactcgatgaatgcagtgacagaaggcattgatgcaattgccactacccgggttgtaattcgtggggagagtgaaacaagtactattactacccatgctttaacgggagaaactgttattcgaacatttagtgggactggagcgggaatggatgtcgttgtttccagtgtcaaggcctatattgctgcactaaacaagatgtcgggtttcaaggaatcctctcaatctgctgaaaaaatttcaatttcttcattgaagatttga

SEQ ID NO: 7118 - protein, 624 aa, Glycine max
MATVIRNPILFPSTSHRPNQNHSNNTFLIFRFPQTSRSSLHSKSRFAFSCSQSEPPPPSPSASPRRRPPYIPNRIPDPSYVRIFDTTLRDGEQSPGASMTSKEKLDVARQLAKLGVDIIEAGFPAASKDDFEAVKMIAQEVGNAVDDDGYVPVICGLSRCNEKDIRTAWEAVKYAKRPRIHTFIATSAIHMEYKLRMSKDKVVDIARNMVKFARSLGCEDVEFSPEDAGRSDREFLYEILGEVIKAGATTLNIPDTVGITMPSEFGKLIADIKANTPGIENVIISTHCQNDLGLSTANTIEGARAGARQLEVTINGIGERAGNASLEEVVMALRCGAHVNGNLYTGINTKHIFLTSKMVEEYTGLQIQPHKALVGANAFAHESGIHQDGMLKHKGTYEIISPEDIGLERTNEAGIVLGKLSGRHALRKRLEELGYELNDDQVQTLFWCFKAVAEQKKRVTDADLRALVSDEVFQAEPVWKLGDLQVTCGTLGLSTATVKLLSSDGSTHVACSIGTGPVDSAYKAVDLIVKEQVTLLEYSMNAVTEGIDAIATTRVVIRGESETSTITTHALTGETVIRTFSGTGAGMDVVVSSVKAYIAALNKMSGFKESSQSAEKISISSLKI

SEQ ID NO: 7119 - DNA, 1875 bp, Glycine max
  CDS (1)..(1875)
atggccaccgtgatccgcaatcctatcctctttccctccacctctcaccgccccaaccaaaaccacagcaacaacacattcctcattttccgcttccctcaaacctcacgctcttctctccactccaaatcccgattcgccttttcctgctcccaatcggagcctcctcctccttctccttctgcttctcctcgacggcgtcctccgtacatcccgaaccgcattcctgacccttcctatgtccgcattttcgacaccactctccgcgacggcgagcagtccccgggcgcctccatgacctccaaggagaagctggatgtggcgcggcagcttgccaagctcggcgtcgacatcatcgaggccggcttccctgccgcctccaaggatgacttcgaggccgtcaaaatgatcgcccaagaggtcggcaacgccgttgacgacgacggatacgtccccgtcatctgtggcctctcccgctgcaacgagaaggacattcgaacagcctgggaggccgtcaagtacgccaagaggcccaggattcacaccttcatcgccaccagcgccattcacatggagtacaagttgagaatgtccaaagacaaggtcgtcgacattgcccgcaatatggtcaagttcgctcgtagtttgggctgcgaagacgtcgagttcagtcctgaagatgctggaaggtcggatagggagtttctttatgaaattcttggagaagttattaaggccggcgccaccacgctcaacatacctgacactgttggtataaccatgcccagtgaatttggaaagttgattgctgatattaaagctaatacccctggaattgaaaatgttattatttccacccactgccagaatgatctcggactttctactgcaaacactatagagggtgcgcgtgccggtgcaaggcaactggaagtgacgattaatgggattggtgaaagggctggaaatgcctccctagaagaggttgtgatggccttgagatgcggagcacatgtcaatggcaatctctacactggaattaatacaaagcacatctttctgacgagcaagatggtcgaagagtacactggtttgcagatacagccacacaaggctcttgtgggagctaatgccttcgcccatgaaagtggcatacatcaggatggaatgctaaaacacaaaggtacatatgaaataatatcacccgaggacatcggacttgaaagaaccaatgaagcaggtattgtactggggaagcttagtggtcgccatgctttgagaaagcgacttgaagagcttggttatgaacttaatgacgaccaagttcagactttattttggcgttttaaagcagtggctgagcaaaaaaagagggttactgatgctgacctcagagcattggtatcagatgaagtttttcaagcagagcctgtctggaaacttggtgatttgcaggtgacttgtggaactcttggcctttctacagcaactgtcaaacttttgagtagtgatggtagcacacatgttgcttgttctgttggtacaggaccagtggattcggcatacaaggctgtggatctgattgtgaaggagccagtaacacttcttgagtactcaatgaatgcagtcacggaaggcatcgatgcaattgccactacccgggttgtgattcgtggggagagtgaaacaagtactagtactactcatgctttaactggagaagctgttcttcgaacatttagtgggactggagcgggaatggatgtcgttgtttccagtgtcaaggcctatattgctgcactaaacaagatgttgggtttcaaggaaacatctccatctgctgaaaaaattccagtttcttcattgaagatttga

SEQ ID NO: 7120 - protein, 624 aa, Glycine max
MATVIRNPILFPSTSHRPNQNHSNNTFLIFRFPQTSRSSLHSKSRFAFSCSQSEPPPPSPSASPRRRPPYIPNRIPDPSYVRIFDTTLRDGEQSPGASMTSKEKLDVARQLAKLGVDIIEAGFPAASKDDFEAVKMIAQEVGNAVDDDGYVPVICGLSRCNEKDIRTAWEAVKYAKRPRIHTFIATSAIHMEYKLRMSKDKVVDIARNMVKFARSLGCEDVEFSPEDAGRSDREFLYEILGEVIKAGATTLNIPDTVGITMPSEFGKLIADIKANTPGIENVIISTHCQNDLGLSTANTIEGARAGARQLEVTINGIGERAGNASLEEVVMALRCGAHVNGNLYTGINTKHIFLTSKMVEEYTGLQIQPHKALVGANAFAHESGIHQDGMLKHKGTYEIISPEDIGLERTNEAGIVLGKLSGRHALRKRLEELGYELNDDQVQTLFWRFKAVAEQKKRVTDADLRALVSDEVFQAEPVWKLGDLQVTCGTLGLSTATVKLLSSDGSTHVACSVGTGPVDSAYKAVDLIVKEPVTLLEYSMNAVTEGIDAIATTRVVIRGESETSTSTTHALTGEAVLRTFSGTGAGMDVVVSSVKAYIAALNKMLGFKETSPSAEKIPVSSLKI

SEQ ID NO: 7121 - DNA, 1674 bp, Glycine max
  CDS (1)..(1674)
atggcagccaaaacatctaccaacggcactcattattctcgctctcgccccgagtacattccaaaccgcatccccgacccgcattatggccgcatcctggacaccacgcttcgcgacggcgagcaagcccccggagcctccatggtttccagccagaagctccggattgctcgccagctcgcgaagcttggcgtcgatgtcatcgaaggaggctttccttcagcgtcgcaggaagacttcaatgctgtcaagatgatagcacaagaagttggcaacaactgtgatgctgatggctatgttcccgtcattgccgccctctgtaggtgcaatgagaaggacattgccacagcgtgggaggctctgaaatacgccaagaggccgaggcttatgcctttcatagcagtgagccccattcacatggagtacaagctcaataagactaaagaagaggtgcttcaaatagctaaagatatgatcaaatttgcacgcagtttaggttgcagtgacatccagttctgttccgaagatgcagccagatcggatagagagtttctttatcaaattttggaagaagttatcaaagctggggcatcaactttgggcataggtgacactgtgggcataacaatgccattcgagattagacaattgattgctgatataaaagccaatgtccctggagcagaaaatgttattatttctatgcactgtcataatgatcttggacatgctactgcaaacgcaatagaggctgctcaagctggtgcaatgcaattagaagtaacaattaatgggattggtgaaagggctggtaatgcctcattagaagaggttgtgatggccctaaaatgcaggggagatcaagtcttaggtggtttgtatactggaattaatacaaggcacttattgaagacaagcaagatggtcgaagagttttctggtatgtatttacaaccacacaaagctgttgtaggtgataatgcctttctccatgaaagtggcgttcaccaggctggattgttaaagcatagagctacatatgaaataatgtctcccgaagatattggtcatgaaaagtccagtggagttaatatggtactagggaagctaagtggacgccaagctttgaaaagtcgtctcaaagagcttggctatgaacttagggatgaagaagttgagagtgtgtttaggaacttcaaagcaatagccgagaaaaaaaagagagttaccgatgttgacctcaaagcattggtgtcaaatcaagtttctcatgatgaacctatttggaagcttgatggtttgcaggtgacttgtggaactatgggttcttcaacagcaactatcaaacttgtcactagtgatggtatcacacatgttgcttgttctgttggtgtaggaccagtagattcagcttacaagactatcaatctcatcgtgaaggaaactgtaaaagtacttgagtactcactaagtacagttacagaaggcactgatgcaattgcaactacacgtgttgtaattcgtagagagaataagcaatcaccaactcctgctttgaatggaaacgtaatttatccaacatttagtggaaccggagaaggggtggatgttgttacttcaagtgtagaggcttatcttactgcactaaacaaaatgctcgatttaaaggaatga

SEQ ID NO: 7122 - protein, 557 aa, Glycine max
MAAKTSTNGTHYSRSRPEYIPNRIPDPHYGRILDTTLRDGEQAPGASMVSSQKLRIARQLAKLGVDVIEGGFPSASQEDFNAVKMIAQEVGNNCDADGYVPVIAALCRCNEKDIATAWEALKYAKRPRLMPFIAVSPIHMEYKLNKTKEEVLQIAKDMIKFARSLGCSDIQFCSEDAARSDREFLYQILEEVIKAGASTLGIGDTVGITMPFEIRQLIADIKANVPGAENVIISMHCHNDLGHATANAIEAAQAGAMQLEVTINGIGERAGNASLEEVVMALKCRGDQVLGGLYTGINTRHLLKTSKMVEEFSGMYLQPHKAVVGDNAFLHESGVHQAGLLKHRATYEIMSPEDIGHEKSSGVNMVLGKLSGRQALKSRLKELGYELRDEEVESVFRNFKAIAEKKKRVTDVDLKALVSNQVSHDEPIWKLDGLQVTCGTMGSSTATIKLVTSDGITHVACSVGVGPVDSAYKTINLIVKETVKVLEYSLSTVTEGTDAIATTRVVIRRENKQSPTPALNGNVIYPTFSGTGEGVDVVTSSVEAYLTALNKMLDLKE

SEQ ID NO: 7123 - DNA, 1881 bp, Zea mays
  CDS (1)..(1881)
atggcgtcctcgctgctctcctcccccgctaaacccaccaccgccaccaccaccaaaacgaccccggccccaagacccgcccgctccgcccatgtcctctccgccgcccgctgcctccgcctccgcctccgcgcggtccccgcccgagcgtcgtcgcagcatcctccgcctccgcccaccccgcggtcgcggcggccggattacgtcccgaaccgcatcgacgaccccaactacgtgcgcatcttcgacaccacgctgcgcgacggggagcagtcgccgggcgccaccatgacgagcgcccagaagctcgtcgtcgcgcgccagctggcccgcctcggcgtcgacatcatcgaggcagggttcccggcctcctcccccgacgacctcgacgccgtgcgctccatcgccatcgaggtcggcaacccgcccactgccagcgctgggaccgtccacgtgcccgtcatctgcggcctgtcgcggtgcaacaggaaggatatcgacgccgcatgggaggccgtcaggcacgcgcggaggccccggatccacactttcatcgccaccagcgagatccacatgcagcataagctcaggaagacgcccgagcaggtcgtcgctattgccagggagatggtggcgtacgcgcgcagcctcgggtgccccgatgttgaattcagccctgaggatgccggcaggtcaaatcgagaattcctgtatcatatactggaggaagtcattaaagctggagcaaccactcttaatatcccagacactgtcggatacactcttccttatgaatttgggaaattaattgctgacataaaggcaaacacttctggaattgaaaatgctatcatttccactcattgccagaatgaccttggtcttgcgactgccaacacattagcgggtgctcgctcaggagcaagacagttagaggtgactattaatggtattggtgaaagagctggaaatgcttcattggaagaggttgtcatggcaattaaatgtcgtggggagctcttagatggtctatatacgggaattaattcccagcatattactttgacaagcaaaatggtacaagagcatagtggacttcatgtgcaaccacataaggctattgttggtgccaatgcctttgctcatgaaagtggaattcatcaggatggcatgcttaaatataaaggaacatatgaaataatatcgcctgatgatattggtttaacacgtgcaaatgaatttggtattgttcttgggaaactcagcggaaggcatgcagtgagatctaagctagtggagcttggatatgaaatcagtgacaaggaatttgaagatttctttaaacgctacaaagaggtcgcagagaagaaaaagcgtgtaactgatgaagacatagaagcgttattgtcagatgagatattccagcctaaggttatttggtcccttgctgatgtacaggcaacatgtggaacacttggcttatctacagcaacagtgaaactgatagcaccagatggagaggagagaatagcatgttcagttggaacaggtccagttgatgcagcttacaaggctattgaccaaataatccagatcccaactgttctccgagaatatggtatgacctcagtcaccgaaggcatcgacgcaatcgcaacaacccgggtggttgtcaccggagatgtgaccaacaactccaaacatgccttgactggccgcgctttcaaccgctccttcagcgggagcggggcagcaatggacatcgtcgtctccagtgtcagagcttacctgagtgccctgaacaagatgtgtagctttgctggtgccgcgaaagccagcggcgaggtacctgagagtgcaagcgtccaaagcgcagagtga

SEQ ID NO: 7124 - protein, 626 aa, Zea mays
MASSLLSSPAKPTTATTTKTTPAPRPARSAHVLSAARCLRLRLRAVPARASSQHPPPPPTPRSRRPDYVPNRIDDPNYVRIFDTTLRDGEQSPGATMTSAQKLVVARQLARLGVDIIEAGFPASSPDDLDAVRSIAIEVGNPPTASAGTVHVPVICGLSRCNRKDIDAAWEAVRHARRPRIHTFIATSEIHMQHKLRKTPEQVVAIAREMVAYARSLGCPDVEFSPEDAGRSNREFLYHILEEVIKAGATTLNIPDTVGYTLPYEFGKLIADIKANTSGIENAIISTHCQNDLGLATANTLAGARSGARQLEVTINGIGERAGNASLEEVVMAIKCRGELLDGLYTGINSQHITLTSKMVQEHSGLHVQPHKAIVGANAFAHESGIHQDGMLKYKGTYEIISPDDIGLTRANEFGIVLGKLSGRHAVRSKLVELGYEISDKEFEDFFKRYKEVAEKKKRVTDEDIEALLSDEIFQPKVIWSLADVQATCGTLGLSTATVKLIAPDGEERIACSVGTGPVDAAYKAIDQIIQIPTVLREYGMTSVTEGIDAIATTRVVVTGDVTNNSKHALTGRAFNRSFSGSGAAMDIVVSSVRAYLSALNKMCSFAGAAKASGEVPESASVQSAE

SEQ ID NO: 7125 - DNA, 1881 bp, Zea mays
  CDS (1)..(1881)
atggcgtcctcgctgctctcctcccccgctaaacccaccatcaccaccaccaccaaaacgaccccggccccaagacccgcccgctccgcccatgtccatgtcctctccgccgcccgctgcctccgcctccgcctccgcgcgtcgtcgcagcatcctccgcctccgcccaccccgcggtcgcggcggccggattacgtcccgaaccgcatcgacgaccccaactacgtgcgcatcttcgacaccacgctgcgcgacggggagcagtcgccgggcgccaccatgacgagcgcccagaagctcgtcgtcgcgcgccagctggcccgcctcggcgtcgacatcatcgaggccgggttcccggcctcctcccccgacgacctcgacgccgtgcgctccatcgccatcgaggtcggcaacccggcgccaggacccgccggggaggaggacgccgtccacgtgccggtcatctgcggcctctcgcggtgcaaccggagggacatcgacgccgcgtgggaggccgtgcgccacgcgcgccggccccggatccacaccttcatcgccaccagcgacattcacatgcagcataagctcaggaagacgcccgaccaggtggtcgccattgccagggagatggtggcctacgcccgcagcctcggatgcactgacgtcgagttcagccccgaggacgccggcaggtcaaatagagagttcttgtatcatattctaggggaagtcataaaagctggagctacgactctcaatatcccggacactgtcggatacaatcttccttatgaatttggaaagttgattgctgatataaaggcaaacactcctggaattgaaaaggctatcatttccactcattgtcagaatgaccttggtcttgcgactgccaacacactagcgggcgctcgtgcaggagcacggcagttagaggttactattaatggtattggtgaaagggctggaaatgcttctttggaggaggttgtcatggcaattaaatgccgcagagaactgttagatggtctctatactggaatcgattcccgacatatcactttgacgagcaaaatggtgcaagaacatagtggacttcacgtgcagccacataaagctattgttggtgccaatgcgttcgctcatgaaagtggaattcatcaggatgggatgcttaaatataaaggaacttacgaaattatatcgcctgatgatattggtctaacacgtgcaaatgaatttggtattgttcttgggaaactcagcggaaggcatgctgtgagatctaagctagtagagcttggatatgaaatcggtgacaaggaatttgaggacttctttaaacgctacaaagaggttgcagagaagaaaaagcgcgtaactgatgaagacttagaagcgttattgtcggatgagatattccagcctaaggttatttggtcccttgctgatgtacaggcaacatgtggtacacttgctttatctacggcaacagtgaaattgatagcaccagatggagaggagaaaatagcatgttcagtcggaacaggtccagtcgatgcagcttacaaggctgttgacaaaataatccagattccaacggttctccgagaatacagtatgacatcagtcacagaaggcattgacgcaatcgcgacaactcgggttgttgtcactggagatgtgagcaacaacgccaaacatgccctgactggccagtctttcaaccgctccttcagcgggagcggggcatccatggacattgtggtgtccagtgtcagagcttacctgagcgccctgaacaagatctgcagtttcgctggtgccgtgaaagccagcagcgatgtagctgagaccgcaagcgtcccgagcacagaatga

SEQ ID NO: 7126 - protein, 626 aa, Zea mays
MASSLLSSPAKPTITTTTKTTPAPRPARSAHVHVLSAARCLRLRLRASSQHPPPPPTPRSRRPDYVPNRIDDPNYVRIFDTTLRDGEQSPGATMTSAQKLVVARQLARLGVDIIEAGFPASSPDDLDAVRSIAIEVGNPAPGPAGEEDAVHVPVICGLSRCNRRDIDAAWEAVRHARRPRIHTFIATSDIHMQHKLRKTPDQVVAIAREMVAYARSLGCTDVEFSPEDAGRSNREFLYHILGEVIKAGATTLNIPDTVGYNLPYEFGKLIADIKANTPGIEKAIISTHCQNDLGLATANTLAGARAGARQLEVTINGIGERAGNASLEEVVMAIKCRRELLDGLYTGIDSRHITLTSKMVQEHSGLHVQPHKAIVGANAFAHESGIHQDGMLKYKGTYEIISPDDIGLTRANEFGIVLGKLSGRHAVRSKLVELGYEIGDKEFEDFFKRYKEVAEKKKRVTDEDLEALLSDEIFQPKVIWSLADVQATCGTLALSTATVKLIAPDGEEKIACSVGTGPVDAAYKAVDKIIQIPTVLREYSMTSVTEGIDAIATTRVVVTGDVSNNAKHALTGQSFNRSFSGSGASMDIVVSSVRAYLSALNKICSFAGAVKASSDVAETASVPSTE

SEQ ID NO: 7127 - DNA, 1926 bp, Zea mays
  CDS (1)..(1926)
atggccttcaacgctaaaccctactgctccaccaccgccaaaccgcccacccccgccgcccaccgctcgccgtccggcccgtccccctgcatctccgtccgcgccgccgccgtatccccccgcgcccggcactcagcctatggcctctccgccgccggcaacgcgtcctccagcaccgtccgcctccgcgcgctggcccagcgcacccgggcgcagccgcagcctccccggcggcggcccgagtacgtgccgaaccgcatcgacgaccccaactacgtgcgcatcttcgacaccacgctccgcgacggggagcagtcgccgggcgccaccatgacgagcgccgagaagctcgtcgtcgcgcgccagctggcccgcctcggcgtcgacgtcatcgaggccgggttcccggcctcctcccccgacgacctcgacgccgtgcgctccatcgccatcaaggtcggcaacccgccgccgggggacgacgggggcgcccacgtgcccgtcatctgcggcctctcgcgctgcaacaggagggacatcgacgccgcgtgggaggccgtcaggcacgcgcggaggcccaggatccacaccttcatcgccaccagcgagatccacatgcagcacaagctcaggaagacgcccgaccaggtcgtcgccgttgccagggagatggtggcgtacgcacgcagccttgggtgcgccgatgtcgagttcagccctgaggatgccggcaggtcaaatcgagaattcctgtaccatatactggaggaagtcataaaagctggggcaaccactcttaatatcccagatactgtcggatacactcttccttatgaatttgggaagttaatttctgacataaaggaaaacactcctggaattgaaaatgccattatttccactcattgccagaatgaccttggccttgcaactgccaacacattagcgggtgctcatgcaggagcacgacagttagaggtgactattaatggtattggtgaaagggctggaaatgcttcattggaagaggttgtcatggcaattaaatgtcgtggggagctcttagatggtctatatacgggaataaattcccaacatattactttgacaagcaaaatggtacaagagcacagtggacttcatgtacaaccacataaagctattgttggtgccaatgcctttgcccatgaaagtggaattcatcaggatgggatgcttaaatataaaggaacatatgaaataatatcgcctgatgatattggtttagcacgtgcaaatgaatttggtattgttcttgggaaactcagtggaagacatgcagtgagatctaagctggtagagcttggatatgaaatcagtgacaaggaatttgaagatttctttaaacgctacaaagaggtcgcagagaagaaaaagcgtgtaactgatgaggacatagaagctttattgtcagatgagatattccagcctaaggttatttggtcccttgctgatgtacaggcaacatgtggaacacttggcttatctacagcaactgtgaaactgatagggccagatggagaggagagaatagcatgttcagttggaacaggtccagttgatgcagcttacaaggctgttgaccaaataatccagattccaaccgtcctccgagaatacggcatgacttcagtcacagaaggcattgacgctattgcgacgactcgagtggttgtcaccggagacgtggccaacaactccaaacacgccttgactggccactctttcaaccgctccttcagcgggagcggggcggcaatggacatcgtcgtgtccagcgtcagagcttacctgagtgccctgaacaagatgtgcagcttcgctggcgctgcgagagccagcagcaccgaggtgcctgggagcgcaagtgttcaacgcgcagaatga

SEQ ID NO: 7128 - protein, 641 aa, Zea mays
MAFNAKPYCSTTAKPPTPAAHRSPSGPSPCISVRAAAVSPRARHSAYGLSAAGNASSSTVRLRALAQRTRAQPQPPRRRPEYVPNRIDDPNYVRIFDTTLRDGEQSPGATMTSAEKLVVARQLARLGVDVIEAGFPASSPDDLDAVRSIAIKVGNPPPGDDGGAHVPVICGLSRCNRRDIDAAWEAVRHARRPRIHTFIATSEIHMQHKLRKTPDQVVAVAREMVAYARSLGCADVEFSPEDAGRSNREFLYHILEEVIKAGATTLNIPDTVGYTLPYEFGKLISDIKENTPGIENAIISTHCQNDLGLATANTLAGAHAGARQLEVTINGIGERAGNASLEEVVMAIKCRGELLDGLYTGINSQHITLTSKMVQEHSGLHVQPHKAIVGANAFAHESGIHQDGMLKYKGTYEIISPDDIGLARANEFGIVLGKLSGRHAVRSKLVELGYEISDKEFEDFFKRYKEVAEKKKRVTDEDIEALLSDEIFQPKVIWSLADVQATCGTLGLSTATVKLIGPDGEERIACSVGTGPVDAAYKAVDQIIQIPTVLREYGMTSVTEGIDAIATTRVVVTGDVANNSKHALTGHSFNRSFSGSGAAMDIVVSSVRAYLSALNKMCSFAGAARASSTEVPGSASVQRAE

SEQ ID NO: 7129 - DNA, 1881 bp, Zea mays
  CDS (1)..(1881)
atggcgtcctcgctgctctcctcccccgctaaacccaccatcaccaccaccaccaaaacgaccccggccccaagacccgcccgctccgcccatgtccatgtcctctccgccgcccgctgcctccgcctccgcctccgcgcgtcgtcgcagcatcctccgcctccgcccaccccgcggtcgcggcggccggattacgtcccgaaccgcatcgacgaccccaactacgtgcgcatcttcgacaccacgctgcgcgacggggagcagtcgccgggcgccaccatgacgagcgcccagaagctcgtcgtcgcgcgccagctggcccgcctcggcgtcgacatcatcgaggccgggttcccggcctcctcccccgacgacctcgacgccgtgcgctccatcgccatcgaggtcggcaacccggcgccaggacccgccggggaggaggacgccgtccacgtgccggtcatctgcggcctctcgcggtgcaaccggaaggacatcgacgccgcgtgggaggccgtgcgccacgcgcgccgcccccggatccacaccttcatcgccaccagcgacattcacatgcagcataagctcaggaagacgcccgaccaggtggtcgccattgccagggagatggtggcctacgcccgcagcctcggatgcactgacgtcgagttcagccccgaggacgccggcaggtcaaatagagagttcttgtatcatattctaggggaagtcataaaagctggagctacgactctcaatatcccggacactgtcggatacaatcttccttatgaatttggaaagttgattgctgatataaaggcaaacactcctggaattgaaaaggctatcatttccactcattgtcagaatgaccttggtcttgcgactgccaacacactagcgggcgctcgtgcaggagcacggcagttagaggttactattaatggtattggtgaaagggctggaaatgcttctttggaggaggttgtcatggcaattaaatgccgcagagaactgttagatggtctctatactggaatcgattcccgacatatcactttgacgagcaaaatggtgcaagagcatagtggacttcacgtgcagccacataaagctattgttggtgccaatgcgttcgctcatgaaagtggaattcatcaggatgggatgcttaaatataaaggaacatacgaaattatatcgcctgatgatattggtctaacacgtgcaaatgaatttggtattgttcttgggaaactcagcggaaggcatgctgtgagatctaagctagtagagcttggatatgaaatcggtgacaaggaatttgaggacttctttaaacgctacaaagaggttgcagagaagaaaaagcgcgtaactgatgaagacttagaagcgttattgtcagatgagatattccagcctaaggttatttggtcccttgctgatgtacaggcaacatgtggtacacttgctttatctacggcaacagtgaaattggtagcaccagatggagaggagaaaatagcatgttcagtcggaacaggtccagtcgatgcagcttacaaggctgttgacaaaataatccagattccaacggttctccgagaatacagtatgacatcagtcacagaaggcattgacgcaatcgcgacaactcgggttgttgtcactggagatgtgagcaacaacgccaaacatgccctgactggccagtccttcaaccgctccttcagcgggagcggggcatccatggacattgtggtgtccagtgtcagagcttacctgagcgccctgaacaagatctgcagtttcgctggcgccgtgaaagccagcagcgatgtagctgagaccgcaagcgtcccgagcacagaatga

SEQ ID NO: 7130 - protein, 626 aa, Zea mays
MASSLLSSPAKPTITTTTKTTPAPRPARSAHVHVLSAARCLRLRLRASSQHPPPPPTPRSRRPDYVPNRIDDPNYVRIFDTTLRDGEQSPGATMTSAQKLVVARQLARLGVDIIEAGFPASSPDDLDAVRSIAIEVGNPAPGPAGEEDAVHVPVICGLSRCNRKDIDAAWEAVRHARRPRIHTFIATSDIHMQHKLRKTPDQVVAIAREMVAYARSLGCTDVEFSPEDAGRSNREFLYHILGEVIKAGATTLNIPDTVGYNLPYEFGKLIADIKANTPGIEKAIISTHCQNDLGLATANTLAGARAGARQLEVTINGIGERAGNASLEEVVMAIKCRRELLDGLYTGIDSRHITLTSKMVQEHSGLHVQPHKAIVGANAFAHESGIHQDGMLKYKGTYEIISPDDIGLTRANEFGIVLGKLSGRHAVRSKLVELGYEIGDKEFEDFFKRYKEVAEKKKRVTDEDLEALLSDEIFQPKVIWSLADVQATCGTLALSTATVKLVAPDGEEKIACSVGTGPVDAAYKAVDKIIQIPTVLREYSMTSVTEGIDAIATTRVVVTGDVSNNAKHALTGQSFNRSFSGSGASMDIVVSSVRAYLSALNKICSFAGAVKASSDVAETASVPSTE

SEQ ID NO: 7131 - DNA, 1866 bp, Zea mays
  CDS (1)..(1866)
atggccttcaacgctaaaccctactgctccaccaccgccaaaccgcccacccccgccgcccaccgctcgccgtccggcccgtccccctgcatctccgtccgcgccgccgccgtatccccccgcgcccggcactcagcctatggcctctccgccgccggcaacgcgtcctccagcaccgtccgcctccgcgcgctggcccagcgcacccgggcgcagccgcagcctccccggcggcggcccgagtacgtgccgaaccgcatcgacgaccccaactacgtgcgcatcttcgacaccacgctccgcgacggggagcagtcgccgggcgccaccatgacgagcgccgagaagctcgtcgtcgcgcgccagctggcccgcctcggcgtcgacgtcatcgaggccgggttcccggcctcctcccccgacgacctcgacgccgtgcgctccatcgccatcgaggtcggcaacccgccgccgggggacgacgggggcgcccacgtgcccgtcaggcacgcgcggaggcccaggatccacaccttcatcgccaccagcgagatccacatgcagcacaagctcaggaagacgcccgaccaggtcgtcgccgttgccagggagatggtggcgtacgcacgcagccttgggtgcgccgatgtcgagttcagccctgaggatgccggcaggtcaaatcgagaattcctgtaccatatactggaggaagtcataaaagctggggcaaccactcttaatatcccagacactgtcggatacactcttccttatgaatttgggaaattaattgctgacataaaggcaaacacttctggaattgaaaatgctatcatttccactcattgccagaatgaccttggtcttgcgactgccaacacattagcgggtgctcgctcaggagcaagacagttagaggtgactattaatggtattggtgaaagagctggaaatgcttcattggaagaggttgtcatggcaattaaatgtcgtggggagctcttagatggtctatatacgggaattaattcccagcatattactttgacaagcaaaatggtacaagagcatagtggacttcatgtgcaaccacataaggctattgttggtgccaatgcctttgctcatgaaagtggaattcatcaggatggcatgcttaaatataaaggaacatatgaaataatatcgcctgatgatattggtttaacacgtgcaaatgaatttggtattgttcttgggaaactcagcggaaggcatgcagtgagatctaagctagtggagcttggatatgaaatcagtgacaaggaatttgaagatttctttaaacgctacaaagaggtcgcagagaagaaaaagcgtgtaactgatgaagacatagaagcgttattgtcagatgagatattccagcctaaggttatttggtcccttgctgatgtacaggcaacatgtggaacacttggcttatctacagcaacagtgaaactgatagcaccagatggagaggagagaatagcatgttcagttggaacaggtccagttgatgcagcttacaaggctattgaccaaataatccagatcccaactgttctccgagaatatggtatgacctcagtcaccgaaggcatcgacgcaatcgcaacaacccgggtggttgtcaccggagatgtgaccaacaactccaaacatgccttgactggccgcgctttcaaccgctccttcagcgggagcggggcagcaatggacatcgtcgtctccagtgtcagagcttacctgagtgccctgaacaagatgtgtagctttgctggtgccgcgaaagccagcggcgaggtacctgagagtgcaagcgtccaaagcgcagagtga

SEQ ID NO: 7132 - protein, 621 aa, Zea mays
MAFNAKPYCSTTAKPPTPAAHRSPSGPSPCISVRAAAVSPRARHSAYGLSAAGNASSSTVRLRALAQRTRAQPQPPRRRPEYVPNRIDDPNYVRIFDTTLRDGEQSPGATMTSAEKLVVARQLARLGVDVIEAGFPASSPDDLDAVRSIAIEVGNPPPGDDGGAHVPVRHARRPRIHTFIATSEIHMQHKLRKTPDQVVAVAREMVAYARSLGCADVEFSPEDAGRSNREFLYHILEEVIKAGATTLNIPDTVGYTLPYEFGKLIADIKANTSGIENAIISTHCQNDLGLATANTLAGARSGARQLEVTINGIGERAGNASLEEVVMAIKCRGELLDGLYTGINSQHITLTSKMVQEHSGLHVQPHKAIVGANAFAHESGIHQDGMLKYKGTYEIISPDDIGLTRANEFGIVLGKLSGRHAVRSKLVELGYEISDKEFEDFFKRYKEVAEKKKRVTDEDIEALLSDEIFQPKVIWSLADVQATCGTLGLSTATVKLIAPDGEERIACSVGTGPVDAAYKAIDQIIQIPTVLREYGMTSVTEGIDAIATTRVVVTGDVTNNSKHALTGRAFNRSFSGSGAAMDIVVSSVRAYLSALNKMCSFAGAAKASGEVPESASVQSAE

SEQ ID NO: 7133 - DNA, 22 bp, Artificial sequence
  primer
atgcgggagtggaagattattg

SEQ ID NO: 7134 - DNA, 24 bp, Artificial sequence
  primer
ttacgccgtgatccactcccggag

SEQ ID NO: 7135 - protein, 371 aa, Artificial sequence
  consensus sequence
  Variant (10)..(19): Xaa in position 10 to 19 is any amino acid
  Variant (21)..(22): Xaa in position 21 to 22 is any amino acid
  Variant (25)..(26): Xaa in position 25 to 26 is any amino acid
  Variant (28)..(31): Xaa in position 28 to 31 is any amino acid
  Variant (33)..(35): Xaa in position 33 to 35 is any amino acid
  Variant (37)..(37): Xaa in position 37 is any amino acid
  Variant (39)..(39): Xaa in position 39 is any amino acid
  Variant (41)..(52): Xaa in position 41 to 52 is any amino acid
  Variant (54)..(64): Xaa in position 54 to 64 is any amino acid
  Variant (65)..(80): Xaa in position 65 to 80 is any or no amino acid
  Variant (82)..(85): Xaa in position 82 to 85 is any amino acid
  Variant (87)..(101): Xaa in position 87 to 101 is any amino acid
  Variant (102)..(112): Xaa in position 102 to 112 is any or no amino acid
  Variant (114)..(149): Xaa in position 114 to 149 is any amino acid
  Variant (150)..(152): Xaa in position 150 to 152 is any or no amino acid
  Variant (154)..(156): Xaa in position 154 to 156 is any amino acid
  Variant (158)..(159): Xaa in position 158 to 159 is any amino acid
  Variant (161)..(165): Xaa in position 161 to 165 is any amino acid
  Variant (167)..(176): Xaa in position 167 to 176 is any amino acid
  Variant (177)..(177): Xaa in position 177 is any or no amino acid
  Variant (179)..(184): Xaa in position 179 to 184 is any amino acid
  Variant (185)..(185): Xaa in position 185 is any or no amino acid
  Variant (188)..(188): Xaa in position 188 is any amino acid
  Variant (190)..(192): Xaa in position 190 to 192 is any amino acid
  Variant (194)..(212): Xaa in position 194 to 212 is any amino acid
  Variant (213)..(221): Xaa in position 213 to 221 is any or no amino acid
  Variant (223)..(223): Xaa in position 223 is any amino acid
  Variant (227)..(227): Xaa in position 227 is any amino acid
  Variant (229)..(229): Xaa in position 229 is any amino acid
  Variant (231)..(231): Xaa in position 231 is any amino acid
  Variant (234)..(240): Xaa in position 234 to 240 is any amino acid
  Variant (242)..(242): Xaa in position 242 is any amino acid
  Variant (244)..(248): Xaa in position 244 to 248 is any amino acid
  Variant (250)..(251): Xaa in position 250 to 251 is any amino acid
  Variant (253)..(253): Xaa in position 253 is any amino acid
  Variant (257)..(257): Xaa in position 257 is any amino acid
  Variant (260)..(261): Xaa in position 260 to 261 is any amino acid
  Variant (262)..(262): Xaa in position 262 is any or no amino acid
  Variant (264)..(290): Xaa in position 264 to 290 is any amino acid
  Variant (291)..(305): Xaa in position 291 to 305 is any or no amino acid
  Variant (307)..(320): Xaa in position 307 to 320 is any amino acid
  Variant (323)..(324): Xaa in position 323 to 324 is any amino acid
  Variant (325)..(326): Xaa in position 325 to 326 is any or no amino acid
  Variant (328)..(328): Xaa in position 328 is any amino acid
  Variant (330)..(331): Xaa in position 330 to 331 is any amino acid
  Variant (335)..(338): Xaa in position 335 to 338 is any amino acid
  Variant (340)..(343): Xaa in position 340 to 343 is any amino acid
  Variant (347)..(351): Xaa in position 347 to 351 is any amino acid
  Variant (352)..(353): Xaa in position 352 to 353 is any or no amino acid
  Variant (355)..(365): Xaa in position 355 to 365 is any amino acid
  Variant (366)..(370): Xaa in position 366 to 370 is any or no amino acid
DTTLRDGEQXXXXXXXXXXKXXIAXXLXXXXVXXXEXGXPXXXXXXXXXXXXIXXXXXXXXXXXXXXXXXXXXXXXXXXXRXXXXDXXXXXXXXXXXXXXXXXXXXXXXXXXSXXXXXXXXXXXXXXXXXXXXXXXXXXXXXXXXXXXXXXXEXXXDXXRXXXXXLXXXXXXXXXXXGXXXXXXXDTXGXXXPXXXXXXXXXXXXXXXXXXXXXXXXXXXXHXHNDXGXAXANXXXXXXXGXAXXXXXTXXGXGERXGNXXXLXXXXXXXXXXXXXXXXXXXXXXXXXXXXXXXXXXXXXXXXXXVXXXXXXXXXXXXXXVGXXXXFXHXXGIHXXXXLXXXXTYEXXXXXXXGXXXXXXXXXXXXXXXXG

SEQ ID NO: 7136 - protein, 16 aa, Artificial sequence
  protein pattern
  Variant (2)..(3): Xaa in position 2 to 3 is any amino acid
  Variant (4)..(4): Xaa in position 4 is Asp or Asn
  Variant (6)..(6): Xaa in position 6 is any amino acid
  Variant (7)..(7): Xaa in position 7 is Asp or Gly
  Variant (8)..(8): Xaa in position 8 is any amino acid
  Variant (10)..(10): Xaa in position 10 is any amino acid
  Variant (13)..(15): Xaa in position 13 to 15 is any amino acid
  Variant (16)..(16): Xaa in position 16 is Ala or Gly
HXXXDXXXAXANXXXX

SEQ ID NO: 7137 - DNA, 1044 bp, Saccharomyces cerevisiae
  CDS (1)..(1044)
atgacttttatgcaacagcttcaagaggctggggaaagatttaggtgtatcaatggtcttttatgggttgtttttgggcttggtgtcttaaaatgtacaacgttatcacttagatttttagctcttatttttgatctttttttactaccagcagtcaatttcgacaagtatggtgctaaaactggtaaatactgtgctatcactggtgcaagtgacggtattggtaaagaatttgctagacaaatggcgaaacgtggcttcaacttggtattgatctcgagaacgcaatctaaattggaggctttacaaaaagaactagaagatcaacatcatgtcgttgtaaagattctagccattgacattgcggaggataaagaatccaactatgaatccattaaggaattgtgtgcgcagttaccaatcaccgttttggtcaataatgttggtcaatcacactccattcctgttccatttttggaaacagaagagaaggagcttagaaatattatcactatcaataacactgctacattattaattacacaaatcattgcaccaaagattgtggaaactgtgaaagctgaaaacaagaagtcgggtactcgtggtttgatcttaaccatgggctcatttggtggtctgattcccaccccacttttggctacatacagtggttcgaaatcattcttacaaggttggtctaactctttggctggggaattatctaaagatgctatcgatgttgaattaatcatttcatatttggtcactagctcgatgtctaaaatcagaagatcatctttaatgatcccaaatccacaacagtttgtaaaatccactttaagaagcgttggcagacgctgcggctctcaagaaagatacgctactatgaccccttactgggcgcacgcagtgtatcaatttgtaattacagagacctttggcgtttactctaagattgttaactccattaattattccttccataaatctatcagaattagagccttaaaaaaagccgcaagacaggttaaaaaggaatag

SEQ ID NO: 7138 - protein, 347 aa, Saccharomyces cerevisiae
MTFMQQLQEAGERFRCINGLLWVVFGLGVLKCTTLSLRFLALIFDLFLLPAVNFDKYGAKTGKYCAITGASDGIGKEFARQMAKRGFNLVLISRTQSKLEALQKELEDQHHVVVKILAIDIAEDKESNYESIKELCAQLPITVLVNNVGQSHSIPVPFLETEEKELRNIITINNTATLLITQIIAPKIVETVKAENKKSGTRGLILTMGSFGGLIPTPLLATYSGSKSFLQGWSNSLAGELSKDAIDVELIISYLVTSSMSKIRRSSLMIPNPQQFVKSTLRSVGRRCGSQERYATMTPYWAHAVYQFVITETFGVYSKIVNSINYSFHKSIRIRALKKAARQVKKE

SEQ ID NO: 7139 - DNA, 1267 bp, Glycine max
  CDS (59)..(1054)
ccggatttaaggttaagacccacgcgtccggttagaaaatttcttggagtttgttagaatgaaaatggaggggcttgatttgttcctagtagcaacgaatcatagaggcttcatttgtgtgtgcagtgcccttatcaaatttctcaagtgggtatgggtggtgttcttgaggccaccaaagaatctcaaagagtatggttcatgggccataatcactggctccactgatggaattggcaaggccatggcttttgaattggcatctaagggacttaaccttctcttggttggtagaaaccctctaaaacttgaggcaacatccaaggaaataagagatagacttgatgttgaggttaagtttgtggtcatagacatgcaaaaagttgagggagttgaaatagtaaaaaaagtagaggaagcaatagatggattggatataggtttgctagttaatggtgcaggcttggcttacccttatgctagattctttcatgaggttgatttggagcttatggatgctattataaaagtaaacttggagggagcaacttggatcacaaaggcagtgcttcccactatgatcaagaagaaaaagggagcaatagtgaacattggctctggttccactgttgtgcttccttcatatcctctagtcaccctctatgctgctacaaaagcataccttgcaatgttctcgagatgcatcagtttggaatacaagcatcaaggaattgacatccaatgtcaggttccattatttgtatcaacaaagatgaccaaaatgaagacatcaatttttgttccaacgccggctatgtatagtaaaacatgcacaagatggattggatacgaaaaactggttgagccatacttcctccattctgtgcaggggtttctcataagggcaattcctgattcattagtggattcctatatgctgcgctattttctttattggcgtggaagaggactctccaaggactccaacattaaaacatcagcagcatctaattctgaagaagcaaacatcattaatcaagatcatacaaattaagtcctagttcctataacaacatttatggaaagttgtggctgatcatggagacccccagtgaattaattatagttttttttttctctttttcttttctttttagatttgcctttcggtaaagtcgtttacctactttccactattgttagttttatacttataagttttatctgcaattggtcagcctttacttaatctagttattctttgaac

SEQ ID NO: 7140 - protein, 331 aa, Glycine max
MKMEGLDLFLVATNHRGFICVCSALIKFLKWVWVVFLRPPKNLKEYGSWAIITGSTDGIGKAMAFELASKGLNLLLVGRNPLKLEATSKEIRDRLDVEVKFVVIDMQKVEGVEIVKKVEEAIDGLDIGLLVNGAGLAYPYARFFHEVDLELMDAIIKVNLEGATWITKAVLPTMIKKKKGAIVNIGSGSTVVLPSYPLVTLYAATKAYLAMFSRCISLEYKHQGIDIQCQVPLFVSTKMTKMKTSIFVPTPAMYSKTCTRWIGYEKLVEPYFLHSVQGFLIRAIPDSLVDSYMLRYFLYWRGRGLSKDSNIKTSAASNSEEANIINQDHTN

SEQ ID NO: 7141 - DNA, 1487 bp, Glycine max
  CDS (161)..(1123)
cccgcttaaatctggtggttttccgctcatctacctcaccccaccgtctctctctctctcataaattcaatgctctcatcgttttccctcataaaccgctttctcgtgttgtaacacactcatcactcatcatattcattcacacttcccactttccaatatggaatgctgcataatcgccaggctcaagacccaacctttatggttcgcgctgctcttcgttgtcggattgttaacgattctcaaattggctttcgttgttttcagatgggtctacgtcaatttcctccgaccaccgaagaatctcaaaaagtacggatcttgggcagtggttactggacccactgacggcattggaaagagcttcgctttcgagctcgctcgcaagggcctgaacctcgtccttgtcggaaggaaccccgacaagctcaaagacgtgtcggattcgatcgcggcgaagttcagaagaaccgaggttaagaccgtcgtggttgacttctccggggatctggacgagggcgtgaagaagattagcgaagcgattgaagggttggaagttggagtgctcgttaacaatgtgggagtttcgtatccttacgcgaggttcttccacgaagtggacgaggggcttctcaacaaccttattaaggttaacgttgttggaaccactaaggtcacgcaagctgttctgccagggatgctcaggagaaagaagggggcgattgttaacattggttctggagctgctattgttattccttctgatcctctttatgctgtttatgccgccaccaaagcgtacatcgaccagttttcgagatgtctctatgttgaatacaagaagagtgggattgacgttcagtgtcagattccattatatgtggcaaccaagatggcatcaatcaggaaatcttcattctttgttccatcaacagatggctatgccaaagcaggtgtgaaatggataggctatgagcctcgttgcacaccatactggccgcatactcttctttgggctgtggcattctcattgcccgagtttgttgttgatgcttggcgcctgtggttttgcttgggtattcgaaagaggggacagcgcaaagagtccatgaagaaggaataaaaggatgcttggttctgatgtgtaggccaatagacgctactcatctgataatatatatgcagattgttagctgattaaggattccaagtacctgctgtgttcctgattttcatcttactgttattactcttttgttagtatcagttgtgtggcatattcttttcactcacctgttttgggtgtttctgttcactgttttagtagtgtgttgaactgatatcatatattggcatatcgcttaacccggttttatctggtgtaactcctcctttctctcttattttgagcttttaggaagccctaaaaattcaagcgaaaattttgagcaggaaattaaactgaataaaagattgattagagtgtg

SEQ ID NO: 7142 - protein, 320 aa, Glycine max
MECCIIARLKTQPLWFALLFVVGLLTILKLAFVVFRWVYVNFLRPPKNLKKYGSWAVVTGPTDGIGKSFAFELARKGLNLVLVGRNPDKLKDVSDSIAAKFRRTEVKTVVVDFSGDLDEGVKKISEAIEGLEVGVLVNNVGVSYPYARFFHEVDEGLLNNLIKVNVVGTTKVTQAVLPGMLRRKKGAIVNIGSGAAIVIPSDPLYAVYAATKAYIDQFSRCLYVEYKKSGIDVQCQIPLYVATKMASIRKSSFFVPSTDGYAKAGVKWIGYEPRCTPYWPHTLLWAVAFSLPEFVVDAWRLWFCLGIRKRGQRKESMKKE

SEQ ID NO: 7143 - DNA, 1308 bp, Oryza sativa
  CDS (1)..(957)
atggacgcgctgtccgcgcagccggcgtgggcgctggcgctggccggggtgggcctcatggtggccgcgaccgcctcggcgcgcctcgcgcggtggctctacgcggcgttcctccgcccggggaagcccctgcgccgccggtacggcgagtgggcggtcgtcacgggcgccacggacggcatcggccgcgcgctcgcgttccgcttcgcgggcgccgggatgagcctcgtgctcgtgggccgcagccccgacaagctggccgcggtctccggggagatcagggggaagcaccccagggccgaggtccgcaccttcgtgctcgacttcgccgccgagggcctcgccgccaaggtggccgcgctcggggactccatccgcgggctcgacgtcggcgtgctcgtcaacagcgccggcatgtcgtacccgtacgcgcgctacttccacgaggtggacgaggagctgatgcgcaacctcatccgcctcaacgtcgaggcgctcacccgggtcacccacgccgtgctcccaggcatggtggagcgcaagcgcggcgccatcgtcaacatcggctccggcgcctcctccatcctgccgtcctacccgctctacagcgtctacgccgccaccaaggcgtatgttgatcaattctcgagatgcctctatgttgagtacaagaacaaaggcatcgatgtgcaatgccaggtacccctgtacgcggcgacgaagatggcgtccatcaagaaggcgtccttcttcgcgccgtcgccggagacgtacgcccgcgccgccgtgcgctacatcgggtacgagccgaggtgcacgccctactggccgcacgcggtgctgtggttcctcatctccgcgttcccggagcccatcgtggacaggctcctcctcaacatgtccgtcggcatccgcaagaggggcatggccaaggacgccaggaagaagacgcagtgacgaaccagcaccaaagaatctgagcgatagtactctctacttcttctcctctgcagcttccgaaacattgggcgtttgatttaccccgtatctctggattagttcttctcatgagtaaggtgatgatgagctgatggttaaacagtgtgtctggtttgatgtactaagattgaagagtttaagaccatgtgacacgaactcgatctggcctggttaataaagcgcgggaaaaaggctttgccttctgctaatataaaaaaaaaaaaaaaaaaaaaaaaaaaaaaaaaaaaaaaaaaaaaaaaaaaaaaaaaaaaaaaaaaaaaaaaaaaaaaaaaaaaaaaaaaaaaaaaa

SEQ ID NO: 7144 - protein, 318 aa, Oryza sativa
MDALSAQPAWALALAGVGLMVAATASARLARWLYAAFLRPGKPLRRRYGEWAVVTGATDGIGRALAFRFAGAGMSLVLVGRSPDKLAAVSGEIRGKHPRAEVRTFVLDFAAEGLAAKVAALGDSIRGLDVGVLVNSAGMSYPYARYFHEVDEELMRNLIRLNVEALTRVTHAVLPGMVERKRGAIVNIGSGASSILPSYPLYSVYAATKAYVDQFSRCLYVEYKNKGIDVQCQVPLYAATKMASIKKASFFAPSPETYARAAVRYIGYEPRCTPYWPHAVLWFLISAFPEPIVDRLLLNMSVGIRKRGMAKDARKKTQ

SEQ ID NO: 7145 - DNA, 1491 bp, Zea mays
  CDS (129)..(1109)
  misc_feature (1481)..(1481): n is a, g, c or t
  misc_feature (1484)..(1484): n is a, g, c or t
gtcatgccccttataagctcgacacaggggcaggcacaccgcacagcaccgcaccgcactgcatcggtcgccagccgagccgagccgagccctgctctctcctccagctccccaaatcacactccgccatggccggcacgtgcgctcacgtcgagttcctccgcgcgcagccggcgtgggcgctggcgctggccgcggtgggcctgctcgtggccgtgcgcgccgccgcccgcttcgcgctctgggtctacgccgcgttcctccgcccgggcaagcccctgcgccgccgctacggcgcctgggccgtcgtgacgggcgccaccgacggcatcggccgcgccgtcgccttccgcctcgccgcgtccgggctcgggctcgtcctcgtcggccgcaaccaggagaagctggccgccgtcgccgccgagatcaaggccaggcaccccaaggtccccgaggtgcggaccttcgtgctcgacttcgccggcgaggggctggccgccggcgtcgaggcgctcaaggactccatccggggcctcgacgtcggcgtgctcgtcaacaacgccggcgtgtcctacccgtacgcgcgctacttccacgaggtggacgaggagctgatgcgcaccctcatccgggtcaacgtcgagggcgtcacgcgtgtcacgcacgccgtgctgccggccatggtcgagcggaagcgcggcgccattgtcaacatcggctccggcgccgcctccgtcgtgccttctgatccgctctactccgtctacgccgctaccaaagcgtatgttgaccaattctcaagatgcctctatgttgagtacaagagcaagggtattgatgtgcaatgccaggtgcccttatacgtggcgacaaagatggcatccatcaggaagtcttccttcatggtcccatctgctgacacctatgctcgtgctgccgttcgtcacattggatacgagcctaggtgcacaccatactggccacactctgtcgtgtggttcttgatctccattcttcccgagtcccttatcgacagcgtgcgcctgggcatgtgcattaagatccgcaagaaggggctggccaaggacgccaagaagaaggcgctgtgattgatgtttcagaatgcatgttcagattcgcacatttcctcatcacctgtagtagacatgtgccttgctgtagtcactttattagctaccattacctcctgagtctgttaagaatcgagaatgtcattgttccatccgcggttatgatgatgaaaaatacgattcttcaattcaaaatgtaacactaatacgagtaatgatgcatgaaattaacttgaagaagttgtgcaactcagttgtttttctgaaccatttcacatttttgtaaaaaaaaaaaaaaaaaaaaaaaaaatcccttcttccattcaaaatgttacactaatacgagtaatgatgcatgaaattaacttgaaaaaaaaaaaaaaaaaaggncgncggccgt

SEQ ID NO: 7146 - protein, 326 aa, Zea mays
MAGTCAHVEFLRAQPAWALALAAVGLLVAVRAAARFALWVYAAFLRPGKPLRRRYGAWAVVTGATDGIGRAVAFRLAASGLGLVLVGRNQEKLAAVAAEIKARHPKVPEVRTFVLDFAGEGLAAGVEALKDSIRGLDVGVLVNNAGVSYPYARYFHEVDEELMRTLIRVNVEGVTRVTHAVLPAMVERKRGAIVNIGSGAASVVPSDPLYSVYAATKAYVDQFSRCLYVEYKSKGIDVQCQVPLYVATKMASIRKSSFMVPSADTYARAAVRHIGYEPRCTPYWPHSVVWFLISILPESLIDSVRLGMCIKIRKKGLAKDAKKKAL

SEQ ID NO: 7147 - DNA, 1479 bp, Zea mays subsp. mays
  CDS (270)..(1250)
actttgaaatttgtccgtccatacgaactctacgactacgagcctactactctactactgcctacggaggagagagagagatttcatgagttcgtgttcagttagtcttggtgcaccagttccacccaccaccggatataggtcatgccccttataagctcgacacaggggcaggcacaccgcacagcaccgcaccgcactgcatcggtcgccagccgagccgagccgagccctgctctctcctccagctccccaaatcacactccgccatggccggcacgtgcgctcacgtcgagttcctccgcgcgcagccggcgtgggcgctggcgctggccgcggtgggcctgctcgtggccgtgcgcgccgccgcccgcttcgcgctctgggtctacgccgcgttcctccgcccgggcaagcccctgcgccgccgctacggcgcctgggccgtcgtgacgggcgccaccgacggcatcggccgcgccgtcgccttccgcctcgccgcgtccgggctcgggctcgtcctcgtcggccgcaaccaggagaagctggccgccgtcgccgccgagatcaaggccaggcaccccaaggtccccgaggtgcggactttcgtgctcgacttcgccggcgaggggctggccgccgccgtcgaggcgctcaaggactccatccggggcctcgacgtcggcgtgctcgtcaacaacgccggcgtgtcctacccgtacgcgcgctacttccacgaggtggacgaggagctgatgcgcaccctcatccgggtcaacgtcgagggcgtcacgcgtgtcacgcacgccgtgctgccggccatggtcgagaggaagcgcggcgccattgtcaacatcggctccggcgccgcctccgtcgtgccttctgatccgctctactccgtctacgccgctaccaaagcgtatgttgaccaattctcaagatgcctctatgttgagtacaagagcaagggtattgatgtgcaatgccaggtgcccttatacgtggcgacaaagatggcatccatcaggaagtcttccttcatggtcccatctgctgacacctatgctcgtgctgccgttcgtcacattggatacgagcctaggtgcacaccatactggccacactctgtcgtgtggttcttgatctccattcttcccgagtcccttatcgacagcgtgcgcctgggcatgtgcattaagatccgcaagaaggggctggccaaggacgccaagaagaaggcgctgtgattgatgtttcagaatgcatgttcagattcgcacatttcctcatcacctgtagtagacacgtgccttgctgtagtcactttattagctaccattacctcctgagtctgttaagaatcgagaatgtcattgttccatccgcggttatgatgatgaaaaatacgattcttcaattcaaaatgtaacactaatacgagtaatgatgcatgaaattaacttgaagaagttgtgc

SEQ ID NO: 7148 - protein, 326 aa, Zea mays subsp. mays
MAGTCAHVEFLRAQPAWALALAAVGLLVAVRAAARFALWVYAAFLRPGKPLRRRYGAWAVVTGATDGIGRAVAFRLAASGLGLVLVGRNQEKLAAVAAEIKARHPKVPEVRTFVLDFAGEGLAAAVEALKDSIRGLDVGVLVNNAGVSYPYARYFHEVDEELMRTLIRVNVEGVTRVTHAVLPAMVERKRGAIVNIGSGAASVVPSDPLYSVYAATKAYVDQFSRCLYVEYKSKGIDVQCQVPLYVATKMASIRKSSFMVPSADTYARAAVRHIGYEPRCTPYWPHSVVWFLISILPESLIDSVRLGMCIKIRKKGLAKDAKKKAL

SEQ ID NO: 7149 - DNA, 1138 bp, Hordeum vulgare
  CDS (59)..(1036)
gaattccccgctccctaccgcggatcgagccaactcacccccaaacccagcaagcacgatggccggcacgtgcgcccacgtcgagttcctccgcgcgcagccggcgtgggcgctggccctcgcggccgtcggcctcctcgtcgccgcccgcgccgcccttcgcctcgccctctgggtctacgccgccttcctccgccccggcaagcacctgcgccgccgctacgggccctgggccgtcgtcaccggcgccaccgacggcatcggccgcgccatcgccttccgcctcgccgcctccggcctcggcctcgtgctcgtcggccgcaacccggacaagctcgccgccgtctcccaggagatcagggccaagtaccccaagaccgaggtccgcaccttcgtgctcgacttcgcctccgaggggctcgccgccggggtggaggcgctcaaggactccatccggggcctcgacgtcggcgtgctcgtcaacaacgccggggtctcgtacccgtacgcccgctacttccacgaggtggacgaggagctcatgcggagcctcatccgggtcaacgtcgagggcgtaacgcgggtcacccacgccgtgctcccgggcatggtcgacaggaagcgtggcgcaatcgtcaacatcggctccggtgctgcctctgtcgtgccgtccgatccactctactccgtctacgccgccaccaaagcgtacgttgaccagttctcaagatgcctctatgttgagtacaagggtaagggcatcgatgtacaatgccaggtgcccttgtacgtggcaacaaagatggcatcaatcaggaggtcttccttccttgtgccatccgcggacacctatgctcgtgctgctattcgccacattggctatgagccgaggtgcacaccgtactggccacactctgttctgtggttcttgatctcccttctcccagagtcgctggtggacagtacgcgcctcagcatgtgcatcaaaatccgcaagaaggggcaggctaaggatgccaagaagaaagcgcagtgatgattcattgttgagatctgccatgtttgttcgtcatgtgtaacgaatcagtatttgtagctctgttgtcggcatttcaacatcattaccttcgcggaattc

SEQ ID NO: 7150 - protein, 325 aa, Hordeum vulgare
MAGTCAHVEFLRAQPAWALALAAVGLLVAARAALRLALWVYAAFLRPGKHLRRRYGPWAVVTGATDGIGRAIAFRLAASGLGLVLVGRNPDKLAAVSQEIRAKYPKTEVRTFVLDFASEGLAAGVEALKDSIRGLDVGVLVNNAGVSYPYARYFHEVDEELMRSLIRVNVEGVTRVTHAVLPGMVDRKRGAIVNIGSGAASVVPSDPLYSVYAATKAYVDQFSRCLYVEYKGKGIDVQCQVPLYVATKMASIRRSSFLVPSADTYARAAIRHIGYEPRCTPYWPHSVLWFLISLLPESLVDSTRLSMCIKIRKKGQAKDAKKKAQ

SEQ ID NO: 7151 - DNA, 1650 bp, Medicago truncatula
  CDS (1)..(1650)
atggatttgccagatttcttcctagcagcaacaatcacattaggcttcatctccatatgtaaatctctattccattttctcaactggataaggatcatgttcttgagacctcgcaaaaaactcaaagactatggttcatgggctataatcaccggctccaccgatggaataggcaaagccatggcttttgaatttgcatcaaagggactcaacattctcttagttggtagaaaccctcttaaacttgaagcaacatcaaaagagataatagatagaaattttggaaatgttgaggtaaagtttgttgttatagacatgcaaaatattagtggagaggaaataatgaaaagagtagaagaagcaatatatggtttagatgtgggaattttagttaatagtgctggtgtggcttacccttatgctagattttttcatgaggttgatttggatttgatggatgctattatcaaagtgaatgttgaaggaacaacttggattacaaaagctgtgcttcctagtatgattaagaagagaaaaggagctattattaacattggttctggttccagtgttgtacttccttcttttcctcttgtcacaatttatgcagcatcaaaagcgtatcttgcaatgttctctgcatgcaccagtttggaatacaaacaccacgggattgacatccagtgccaggttctctcgtcgtcgcctctcttcttcaccttcatggctccaatgtttgtctcaacaaaaatgacatgtgatatgaagacatcactttttgttccaacaccagataaatacagcaaagcatgcacaaaatggattggctatgaaaaattggttgtgccttacttctttcacaatctgcagtcgtttctcataaggaaaattcctgatgtactcatggattcctatatgctacgtttttttctttaccggcgtgaaaaaggactcatcgacgactcccaaatcaaaggattagaagcatcttttcttattccctttgtcataattgaggtagtctttgtcggttataataatcttaacctcgtgggtcagttgattgaaacgaatgctcaagttttgactagggcgacgaccctccgggaagactggaggtccgcgcaactcatcagaaaagcaggtggcacgaatccagccgcacctcaacatgagccaagcacacaagaagtggttcattggaaaaaaccagcgagaggaaggtacaaatgtaatatcgatgcctcattctcctcctctcttaaccgagttggtattggcatatgtatcagagatgatgcaggtgactttgtgcttgcgaaaactgattggttttctcctttatgtgaagtcacgataggagaagcagttgggttacacacggcgctgcagtggatatcagacctccaatttgataatgttgattttgccctagattcaaagcaggacgtagattcttttcatacaggagtagatgatgataacgaacttggttgtattattacggcctgtagacagttgtttcaggatagttttcaaaactctcatgtcgagtttaataggaggcaagctaatggggtcgctcacgaattagcgagggtagccccatcatttatgatgatgtaccgtcatgtatttggcatcttttga

SEQ ID NO: 7152 - protein, 549 aa, Medicago truncatula
MDLPDFFLAATITLGFISICKSLFHFLNWIRIMFLRPRKKLKDYGSWAIITGSTDGIGKAMAFEFASKGLNILLVGRNPLKLEATSKEIIDRNFGNVEVKFVVIDMQNISGEEIMKRVEEAIYGLDVGILVNSAGVAYPYARFFHEVDLDLMDAIIKVNVEGTTWITKAVLPSMIKKRKGAIINIGSGSSVVLPSFPLVTIYAASKAYLAMFSACTSLEYKHHGIDIQCQVLSSSPLFFTFMAPMFVSTKMTCDMKTSLFVPTPDKYSKACTKWIGYEKLVVPYFFHNLQSFLIRKIPDVLMDSYMLRFFLYRREKGLIDDSQIKGLEASFLIPFVIIEVVFVGYNNLNLVGQLIETNAQVLTRATTLREDWRSAQLIRKAGGTNPAAPQHEPSTQEVVHWKKPARGRYKCNIDASFSSSLNRVGIGICIRDDAGDFVLAKTDWFSPLCEVTIGEAVGLHTALQWISDLQFDNVDFALDSKQDVDSFHTGVDDDNELGCIITACRQLFQDSFQNSHVEFNRRQANGVAHELARVAPSFMMMYRHVFGIF

SEQ ID NO: 7153 - DNA, 876 bp, Medicago truncatula
  CDS (1)..(876)
atgttcttaagaccacacaaaaaactcatagactatggttcatgggctataatcaccggctccaccgatggaataggcaaagccatggcttttgagtttgcattaaagggactcaacattctcttagttggtagaagccctcttaagcttgaggcaacatcaaaagagattatagataaaacttttggaaatgttgaagtcaaatctgttgttgtagacttgcaaaataatagtggagaggaaataatgaataaggttgaagaagctatagatggtttagatgttggaattttagttaatggtgctggtgtggcttatccttatgctagattttttcatgaggttgatttggatttgatggatactattatcaaagtgaatgttgaaggaacaacttggattactaaagctgtgcttcctagtatgattaagaacaaaaaaggagctattattaacattggttctggttccactgttgtgattccttcatatcctcttgtcacactttatgcagcttcaaaagcatatcttgcaatgttctctgcatgcactaatttggaatacaagcagctaggaatcgacatccagtgtcaggtaccattatttgtgtcaacaaaaatgacaaggatgagggcatcactttttgttccaacaccagataaatacagcaaagcatgcacaaaatggattggctatgaaaaattggttgtaccttacctctttcacaatctgcagtcatttctcataaggaaaattcctgatgtattcttggattcctacatgttgcgtaatttgctttacatgcgtaaaagagggctcatcaaggactcccaaatcaaaggatcaaaagcatctagtaattctaaaacaaattaa

SEQ ID NO: 7154 - protein, 291 aa, Medicago truncatula
MFLRPHKKLIDYGSWAIITGSTDGIGKAMAFEFALKGLNILLVGRSPLKLEATSKEIIDKTFGNVEVKSVVVDLQNNSGEEIMNKVEEAIDGLDVGILVNGAGVAYPYARFFHEVDLDLMDTIIKVNVEGTTWITKAVLPSMIKNKKGAIINIGSGSTVVIPSYPLVTLYAASKAYLAMFSACTNLEYKQLGIDIQCQVPLFVSTKMTRMRASLFVPTPDKYSKACTKWIGYEKLVVPYLFHNLQSFLIRKIPDVFLDSYMLRNLLYMRKRGLIKDSQIKGSKASSNSKTN

SEQ ID NO: 7155 - DNA, 963 bp, Medicago truncatula
  CDS (1)..(963)
atggattgttgcataatcagtaaactcaaaacccaaccattctggttcctcattctcttctccctcggtctcttcaccattctcagattcactcttcttcttctcaactggttctatgtcaattttctcagacaacccaaaaacctcaaaaactatggatcttgggccctcgttactggacccaccgatggcattggaaaatccttcgcctttgaactcgctcgcaaaggcttgaacctaatcctcgttggtcgtaaccccgaaaaactcaaagacgtttcagattccatcaaagccaaattcggtaaaaccgaggttaaaaccgttgtcgttgatttcaccggtgatctcgacgacggtgttaagaggattgttgaaacgattgatgggttggatgttggggttttgattaacaacgtggggatttcgtatccttatgcgagatttttccatgaagttgatcaagagcttttgaagaatttgattaaggttaatgttgttggaactactaaggttactcaagctgttttgcctgggatgttgaagaggaaaaagggtgctattgttaatattggttctggtgctgctattgttattccttctgatcctctttatgctgtttatgctgctacaaaagcgtacattgatcaattttctagatgtctttatgttgaatacaagaagagtgggattgatgtgcagtgtcaggttccattatatgtggcaacaaagatggcatcaatcaggagatcttcattctttgttccatcaacagacggctatgcaaaagcaggtgtgaaatggataggatatgaacctcgttgcacaccatactggccacatacccttctatgggccgtggcacgttcgctgccagagtctatagttgatacttggcgccttgggttttgtatgggtattagaaagagggggcagctcaaagattcgaagaagcaggaataa

SEQ ID NO: 7156 - protein, 320 aa, Medicago truncatula
MDCCIISKLKTQPFWFLILFSLGLFTILRFTLLLLNWFYVNFLRQPKNLKNYGSWALVTGPTDGIGKSFAFELARKGLNLILVGRNPEKLKDVSDSIKAKFGKTEVKTVVVDFTGDLDDGVKRIVETIDGLDVGVLINNVGISYPYARFFHEVDQELLKNLIKVNVVGTTKVTQAVLPGMLKRKKGAIVNIGSGAAIVIPSDPLYAVYAATKAYIDQFSRCLYVEYKKSGIDVQCQVPLYVATKMASIRRSSFFVPSTDGYAKAGVKWIGYEPRCTPYWPHTLLWAVARSLPESIVDTWRLGFCMGIRKRGQLKDSKKQE

SEQ ID NO: 7157 - DNA, 996 bp, Magnaporthe grisea 70-15
  CDS (1)..(996)
atggatagcttgacaaccgcactgggcagcgtgccacaagtcgtgcagtgggcccttgctggagtaggagctctctacatctcggccaaggtcttgagttacctgcacctggtcttgaaccttttcattcttggcggcaccaacctcagcaaatatggtaaaaagggcagttgggcggttgtcaccggcgcctcggacggtctcggtaaagagtttgcctcgcaactcgcagccaaaggcttcaacattgtccttgtctcccgcaccgaatcgaagctcaaggaacttgcgaaagagctcgaggccaagaatggcagcctgaagaccaaggttctggcgatggactacgagcaggacaacgacgatgactacgagaaactgggccaactccttagtggcctggatgtcgccatcctgatcaacaatgtcggccgcagccactcgatccccgtgccattcctccagaccccgcgcgaggagctgcagaatattgtaaccatcaactgccttggcacactcaagactacccaggttgtggctcccatcatggctcagcgcaagcggggtctgattctcaccatgggctcattcggcggctggatgcctacgccattcctggctacctacagcggcagcaaggcattcctgcagcactggagcacctcgctcgctgaggagctccgcagcagcggcgtcgacgtccacctggtcctcagctacctcatcgtgtccgccatgagcaaagtgcgccgccccagcgctatggtcccgacgcctcgagctttcgtgcgctcggccttgggcaagattggatgtgctactcagaacgtagcctacacttatactccgtggtggagccatgccattatgcagtggtgggttgagaacactatcggcattggtagcaagatcggattgcaggtcaacctgaagatgcacaaggacattcgcactcgtgcgctgaagaaggcggagagggaggcaaagaaggcttga

SEQ ID NO: 7158 - protein, 331 aa, Magnaporthe grisea 70-15
MDSLTTALGSVPQVVQWALAGVGALYISAKVLSYLHLVLNLFILGGTNLSKYGKKGSWAVVTGASDGLGKEFASQLAAKGFNIVLVSRTESKLKELAKELEAKNGSLKTKVLAMDYEQDNDDDYEKLGQLLSGLDVAILINNVGRSHSIPVPFLQTPREELQNIVTINCLGTLKTTQVVAPIMAQRKRGLILTMGSFGGWMPTPFLATYSGSKAFLQHWSTSLAEELRSSGVDVHLVLSYLIVSAMSKVRRPSAMVPTPRAFVRSALGKIGCATQNVAYTYTPWWSHAIMQWWVENTIGIGSKIGLQVNLKMHKDIRTRALKKAEREAKKA

SEQ ID NO: 7159 - DNA, 1005 bp, Gibberella zeae PH-1
  CDS (1)..(1005)
atgactgctatcgcagactttttcgaaaacgtaccgcagcctctgcaatggggtcttgctggtgttggtgctctcttcctcggctccaagattctgagctatctccaacttgtcctcagcgccttcgttctcggaggtaccaacctgcgtaagtacggaaagcctggtacttgggctgttattaccggtgcctctgatggcctcggcaaggagtatgctctgcaactcgctgccaagggcttcaatctcgtcctcgtttcccgaactctgtccaagctcgagaccctatccaccgagattcaacaaaagtactctggcaagggcctccagatcaaggtccttgatatggacttttccaagaacaacgatgccgattacgagcgcctgagcgagcttatctacggtcttgatgtcggtatcctcatcaacaacgtcggccagagccacagcattcccgttcctttcctcgagaccaccaaggaggagcttgagaacatcatcaccatcaactgcactggtactctccgagttacccagactgtcgctcctatcatgaaggcacgaaagaacggtcttattctgaccatgggatcgttcggtggatggacacctactgctctcctggccacttactctggtagcaaggctttcctccagcagtggagcaacgctcttgcagctgagcttgccgatgacaaggttgatgtctacctcgttctcagccatcttgttaccactgctatgagcaagattcgccgccccagtcttctggtccccaacgctcgcaactttgtcaaggctaccctcggcaaggttggacttggtggataccagacagcaccttatacttataccccctggtggagtcactctttcatgctgtggttcattgagaacatccctggtgccaacggccctatcactatgtctgtaaacaagaagatgcacgaggacattcgccgaagggctctccgcaaggcggccagagaggccaagaagcagtaa

SEQ ID NO: 7160 - protein, 334 aa, Gibberella zeae PH-1
MTAIADFFENVPQPLQWGLAGVGALFLGSKILSYLQLVLSAFVLGGTNLRKYGKPGTWAVITGASDGLGKEYALQLAAKGFNLVLVSRTLSKLETLSTEIQQKYSGKGLQIKVLDMDFSKNNDADYERLSELIYGLDVGILINNVGQSHSIPVPFLETTKEELENIITINCTGTLRVTQTVAPIMKARKNGLILTMGSFGGWTPTALLATYSGSKAFLQQWSNALAAELADDKVDVYLVLSHLVTTAMSKIRRPSLLVPNARNFVKATLGKVGLGGYQTAPYTYTPWWSHSFMLWFIENIPGANGPITMSVNKKMHEDIRRRALRKAAREAKKQ

SEQ ID NO: 7161 - DNA, 1059 bp, Candida glabrata CBS 138
  CDS (1)..(1059)
atgacatttgttagggaattagaggttgctagtcaaaatagcagagcatttaacgtgacactatggtttattttcatcttcggtttgttgaagcttgttccttttgcattgagatttctgtccatggtctttgatctctttgtattaccacctgtcaactatgccaagtatggttgcaaagctggtgactacgctgtggttacaggtgcttccgatggtattggtaaagaatttgcttctcaattggcaagtaaaggcttcaatctagtactaatctcaagaactgaatcaaaactagttgcattgaaggatgaactagaaggcaaattcaacattaaagccaagatcttagccattgatatctctgcggatagcaaggacaactacaacaagatttattccctttgtgatgaccttccaatctctatactagttaacaatgttggccaatctcattctattcctgttccatttttggctactgaagaagaagaaatgagaaacattataactatcaataacaccgctaccttgatgatcactcaaattattgctccaattattatcagaacagttaagaaacacagagaatctggggataaaaagttgaagtctcaacgtggtctgatcttgactatgggctcctttggtggtttgatcccaaccccattgcttgctacatacagtggctctaaggccttcttgcaaaattggtcctcctctctagctggtgaacttgcagcagacaatgtggatgttgagttggttctatcttacttggttactagcgcaatgtcaaaagttagaagaacctctatgatgattcctaatccacgtacttttgtcaagtccactctgagaaatattggcagacgctgtggtgcccaggacaggtatggaacgatcacgcctttctggagtcatgctatctaccattttgtcattgaggaattgtttggtgtctacgccagagttgtcaacgagatcaattacaaattccacaagtctatcagaattagggctgttaggaaggctgtaagagaagccaagcaaaactga

SEQ ID NO: 7162 - protein, 352 aa, Candida glabrata CBS 138
MTFVRELEVASQNSRAFNVTLWFIFIFGLLKLVPFALRFLSMVFDLFVLPPVNYAKYGCKAGDYAVVTGASDGIGKEFASQLASKGFNLVLISRTESKLVALKDELEGKFNIKAKILAIDISADSKDNYNKIYSLCDDLPISILVNNVGQSHSIPVPFLATEEEEMRNIITINNTATLMITQIIAPIIIRTVKKHRESGDKKLKSQRGLILTMGSFGGLIPTPLLATYSGSKAFLQNWSSSLAGELAADNVDVELVLSYLVTSAMSKVRRTSMMIPNPRTFVKSTLRNIGRRCGAQDRYGTITPFWSHAIYHFVIEELFGVYARVVNEINYKFHKSIRIRAVRKAVREAKQN

SEQ ID NO: 7163 - DNA, 1041 bp, Kluyveromyces lactis NRRL Y-1140
  CDS (1)..(1041)
atggtggctttaattgatcaactatacaatgttacagcattgagagaatgcagttccttaaatgttgctgcatggatagttttcgggttaggtatatcaaagatggtgtttttgaccttaaacttcagcaagatggtcttagacttgtttgttcttccaggtccagactttaagaagtacggtaaggggaaaggtgcatatgctgttgttactggtgctagtgacggtattggtaaagaatacgccaaacaattagcgaaacgcgggttcaacctaattttgatcagtagaactgaatcgaagctagttgaattgaagaaggaaatcgagactgaatgcaagattgacgttaaaattttagccattgatgtcagttctgatagcaaggagaactatactttaattagagaagttgcgtcgggtttacctgtaactgttttgatcaataatgttggtaagtctcattcgattccagtaccatttgatcaaaccgaagaatctgaattgagagatataattactatcaacaatactgcgacattaatgatcacacaaactttgttaccacaattaaaagcaagcgttaagacgttgaaatgtcgtggtctaatcttgacaatgggttcctttggtggtctgctacctaccccattcttagctacatacagtggttccaaggcatttttacaaagttggtctaacgccctagctggtgaattatctagcgattctatcgatgttgagttagtgttatcttacttagttaccagtgcaatgtctaagattagaagatcaagtgcattgatcccttctccaaaggctttcgtgagatccacattgaactccattggcaaacgctgtggtgcccaagagcgttttgcaacctccacgccgtattggtctcatgcattataccatttcattatcgagaacaccgtcggtgtgtactctaagattgctaattcaattaattattccttccacttgagtatcagaaagagagctttgaaaaaggctgaaagacaagccaagaagcaataa

SEQ ID NO: 7164 - protein, 346 aa, Kluyveromyces lactis NRRL Y-1140
MVALIDQLYNVTALRECSSLNVAAWIVFGLGISKMVFLTLNFSKMVLDLFVLPGPDFKKYGKGKGAYAVVTGASDGIGKEYAKQLAKRGFNLILISRTESKLVELKKEIETECKIDVKILAIDVSSDSKENYTLIREVASGLPVTVLINNVGKSHSIPVPFDQTEESELRDIITINNTATLMITQTLLPQLKASVKTLKCRGLILTMGSFGGLLPTPFLATYSGSKAFLQSWSNALAGELSSDSIDVELVLSYLVTSAMSKIRRSSALIPSPKAFVRSTLNSIGKRCGAQERFATSTPYWSHALYHFIIENTVGVYSKIANSINYSFHLSIRKRALKKAERQAKKQ

SEQ ID NO: 7165 - DNA, 1041 bp, Debaryomyces hansenii CBS767
  CDS (1)..(1041)
atgtcactttgtcaattcgtgtcatcaatcagtgattgtaggatcacccaagctttaatatatggtgttttgtttgttggtgtttacaaaattaccacattcactttaagtgttggttcgttattagtggatctttttgtcttgccagcagtcgattttaagaagtatggagctaaacaaggcaagtgggcggttgttactggtgcgtccgatggaattggtaaggaatatgcttatcaattggcctctagaggcttgaacgttgttttaatttcaagaactctctcgaaattggaattaattgctactgaaattgaaactaaatacaaggtaagcaccgaagtcattgcattcgatgcttccaccgataatgatgccaactacgctaagatcttgcacaccgtgtccaacttgcctgtcaccgtgttggttaataatgtcggccagtcccactccatcccagtgccattcttggaaaccgaagataaggaattgagagacatcattaccatcaataacacagtcactttgaaaatcacccaggccgtggcccctgttatcgcagacaccgtcgccaaggaaaataaaaaggtcaagggcttaatcttaaccatgggctcgttcggtgggttgttgccaaccccgtacttggctacatactccggttcaaagtccttcttacaagcctggtcctcggccttggccggtgaattgaagcctcaaggtatcgacgtccaattggtcatctcgtacttggtcacctccgccatgtccaagatcagacgctcttcggcatccattccaaacccaaagaacttcgtcacctccgtattgaacactgctggtcgtcgttgtggtgcccaagaaagatttgccaccactactccctactggacccatgcattgatgcactttgggatcgaaaatactgtgggtgtctactcaaaattcgccaactccttgaactttagcatgcataaaagtatccgtgtcagagctttgaagaaagctgctcgtgcaaacgctacaaagaccgattag

SEQ ID NO: 7166 - protein, 346 aa, Debaryomyces hansenii CBS767
MSLCQFVSSISDCRITQALIYGVLFVGVYKITTFTLSVGSLLVDLFVLPAVDFKKYGAKQGKWAVVTGASDGIGKEYAYQLASRGLNVVLISRTLSKLELIATEIETKYKVSTEVIAFDASTDNDANYAKILHTVSNLPVTVLVNNVGQSHSIPVPFLETEDKELRDIITINNTVTLKITQAVAPVIADTVAKENKKVKGLILTMGSFGGLLPTPYLATYSGSKSFLQAWSSALAGELKPQGIDVQLVISYLVTSAMSKIRRSSASIPNPKNFVTSVLNTAGRRCGAQERFATTTPYWTHALMHFGIENTVGVYSKFANSLNFSMHKSIRVRALKKAARANATKTD

SEQ ID NO: 7167 - DNA, 1170 bp, Yarrowia lipolytica CLIB122
  CDS (1)..(1170)
atggtctacgtgaacgcgaaaaactacttttgtgactcgatcatcaacaacacggaccgggtgctgtctgctctcatcaagtaccatggtctctccatcattgccgtctttctgctggcaattggcctcttccacgtggctctgaaggtggtgtcctatgtggccgttcttctcgacgtgtttgtgctgcctcccaccaactacctgccctacggctcccagcggggcgcctgggccgtggtgaccggtgcttctgacggcattggcaaggagtacgcccgacagctgggtctccgaggcttcaacgtgttcctcatttctcgaaccgagtccaagctgcgagagctggcccaggagattgccgaaaagtccaaggtcgagaccaagttcctggccatcgacgtgtccaccgactccccccagaactacaaggacatcgagaccgtgctggagaccatccccagcgtgtctatcctcatcaacaacgtcggcttgtcccactccatccccacccccttcctcgagaccccccccgccgagctgcacaacatcatcgccatcaacaacttggctactctgaagatcacccagctgattgcccccaagattgtcgagtccgtcaaggaggcccgagccaccaagaagttccagaagggtctcattcttaccatgggatcttttggcggcttgctgcccacccccctgctcgctacctactctggttccaaggccttcctccagcactggtccaacgctctggccgtggagcttgcccccgagcacgtcgatgtcgagctcgttgtctcctacctcgtcacctctgccatgtccaaggtccgaaagacctctgctctgatccccaaccccaagcagtttgtcaccgccactctgtcgtccgttggccgagccggaggagcccaggagaagtttgccacctccaccccctactggtcccacgccctgctgcactggtggatcgcccagaccgtcggcgtcttctccaagctcgttgccggcttcaactacaagatgcacgtcgacatccgaaagcgggctctcaagaagcaggcccgacaggccgctggaggcgttgccgaccccaagaacaccaccgctgctcgagagggctacgccaccgagtctctcaagaacgagactctcaagcactaa

SEQ ID NO: 7168 - protein, 389 aa, Yarrowia lipolytica CLIB122
MVYVNAKNYFCDSIINNTDRVLSALIKYHGLSIIAVFLLAIGLFHVALKVVSYVAVLLDVFVLPPTNYLPYGSQRGAWAVVTGASDGIGKEYARQLGLRGFNVFLISRTESKLRELAQEIAEKSKVETKFLAIDVSTDSPQNYKDIETVLETIPSVSILINNVGLSHSIPTPFLETPPAELHNIIAINNLATLKITQLIAPKIVESVKEARATKKFQKGLILTMGSFGGLLPTPLLATYSGSKAFLQHWSNALAVELAPEHVDVELVVSYLVTSAMSKVRKTSALIPNPKQFVTATLSSVGRAGGAQEKFATSTPYWSHALLHWWIAQTVGVFSKLVAGFNYKMHVDIRKRALKKQARQAAGGVADPKNTTAAREGYATESLKNETLKH

SEQ ID NO: 7169 - DNA, 1041 bp, Aspergillus nidulans FGSC A4
  CDS (1)..(1041)
atggaatacttgaaggatatctcgtcgtccctttcgggctgggagttcaactttgctcctggttggcagagcgtgacagcctcagtgctgctcgtggctggaggctggtttgttgtctccagggtttggaccttcctcagggtcttgaccagtctgttcgttcttcccggaaaatcgctccgctcatttggccctaagggtagctgggcaattgttacaggtgcctcggatggtttgggcaaagaattcgccctccagatcgctcgcgctggctacaacatcgtcctcgtttcacgaactgcttccaagctaaccgccttgaccgatgagattacgtctaaatacccctcggtccagaccaagatgctggcgatggattttgctcgcaacttggacgaggactacgaaaagctaaaggccctcattcaagacctagacgtagctatcttgatcaacaatgttggaaagagtcacagcatcccggttcctttcgccctgaccccggaggacgagttggcggacatcatcaccatcaactgcatgggtactttgcgggttacgcaactggttgttccaggcatgacccaacgcaagcgaggattgattctgaccatgggttcttttggtggtctcgttccatctcctctccttgctacctactccggaagcaaggctttccttcagcagtggtccacagctcttggttcagaactccagccgtacggcattactgttgagctggtgcaggcctatctcattacctccgccatgtccaagattcgcaagaccagtgccttaatccctaacccgcgtgcgtttgtcaaggcgacattgtccaagattggcaacaatggcggttccccaggctacgcatacagttcctccccatactggagtcacggattggtcgcataccttgcgacatgcgtgatcaacccgatgagcaaatggctcgcaaaccaaaacaaggctatgcacgagtcgatccgcaagcgggctctgcgcaaggcagaacgtgagaacgcgaagaagagttcttga

SEQ ID NO: 7170 - protein, 346 aa, Aspergillus nidulans FGSC A4
MEYLKDISSSLSGWEFNFAPGWQSVTASVLLVAGGWFVVSRVWTFLRVLTSLFVLPGKSLRSFGPKGSWAIVTGASDGLGKEFALQIARAGYNIVLVSRTASKLTALTDEITSKYPSVQTKMLAMDFARNLDEDYEKLKALIQDLDVAILINNVGKSHSIPVPFALTPEDELADIITINCMGTLRVTQLVVPGMTQRKRGLILTMGSFGGLVPSPLLATYSGSKAFLQQWSTALGSELQPYGITVELVQAYLITSAMSKIRKTSALIPNPRAFVKATLSKIGNNGGSPGYAYSSSPYWSHGLVAYLATCVINPMSKWLANQNKAMHESIRKRALRKAERENAKKSS

SEQ ID NO: 7171 - DNA, 1227 bp, Candida albicans SC5314
  CDS (1)..(1227): transl_table=12
atgtttttaatttcggatattttaaacgtcgtgtgtaagtttaggaccaccacccgcgcgtcttttccgcccacggagaaaaattgttggtgtttcctgaaaaaaaaaagggatggaagaaaaacacacacacataaatctccttctttcttgaaacatacaacaaacaacttaaaaatgcctttcactcaattcttggataaatattcagataatttggctattcaatatgctattatttttgcattgttattaggagttttcaaattgactgtgttttcactcaaatttgcttcattaatatacgacatatttttagcaccagcaaccgatttctccaaatacggtgctgccagtgggaaatgggctgttgttaccggtgcttccgatggtattggtaaagaatatgcttttcagttggccaaaaaggggttcagcattgtcttagtttcaagaacacaatcaaaattagagttgattgccacagaaattgaaagtaaatataaagttaacacaaaaattgttgcatttgatgcttctacagacgatgaagaaaactatttaaaattggaaaaagctgtgtttgatttacctgttaccatattgattaataatgtcgggcaatcccactctattccagttccattcttgaaaactgaaaagaaagaattgaaagatattattactattaacactactgccactttaagaatcactcaaattgttgctccaattattgtctctaccgttgaaaacccacacccaaaacaattgcgtggtttgattttaactatgggttcatttggtgggttattaccaacaccatacttggccacttattccggttcaaaatcctttttgcaagcctggtctgctgccttggctggtgaattacaagctgatcatgttgatgttgaattggtcatttcttatttagttgcttctgccatgtccaaaattaaacgtacttccttaagtattccaaaccctaaacaatttgtcacttctactttgaatggtgttggccgtcgtaatggtgctcaagaaagatttgcaacttcaactccatactggactcatgccttgatgcattttgcaatcgataatactgttggtgtttattcaaaaattgctaataaattgaacttgcaaatgcatcaatctatccgtcaaagagctctaaagaaggctgctagattggctgctgttgctgaaaagaaagattaa

SEQ ID NO: 7172 - protein, 408 aa, Candida albicans SC5314
MFLISDILNVVCKFRTTTRASFPPTEKNCWCFSKKKRDGRKTHTHKSPSFLKHTTNNLKMPFTQFLDKYSDNLAIQYAIIFALLLGVFKLTVFSLKFASLIYDIFLAPATDFSKYGAASGKWAVVTGASDGIGKEYAFQLAKKGFSIVLVSRTQSKLELIATEIESKYKVNTKIVAFDASTDDEENYLKLEKAVFDLPVTILINNVGQSHSIPVPFLKTEKKELKDIITINTTATLRITQIVAPIIVSTVENPHPKQLRGLILTMGSFGGLLPTPYLATYSGSKSFLQAWSAALAGELQADHVDVELVISYLVASAMSKIKRTSLSIPNPKQFVTSTLNGVGRRNGAQERFATSTPYWTHALMHFAIDNTVGVYSKIANKLNLQMHQSIRQRALKKAARLAAVAEKKD

SEQ ID NO: 7173 - DNA, 1041 bp, Aspergillus oryzae
  CDS (1)..(1041)
atggatttcctatcgaagcacacaacctgtctgtctaacctggagcttaatcttgctcctggatggcagactgtcagcgcgtatttccttcttgcagcaggaagcttgtttgtcgcctctagagctttgacttttgtcagagttcttctcagcctgtttgttcttcccggaaagtcgcttcgctctttcggccccaagggtagctgggccgtggtcacaggtgcatccgacggtttgggcaaagaattctcgctccaacttgctcgcgctggcttcaacatcgtccttgtctcccggactgcctcgaagctgactacgttgtccgatgaaatcacctccaagtacgcctccgtccagaccaaaaccctggctatggactttgctcgcaacgaagatagcgactatgagaagctgaaggccctggtggatgagctggacgtagccattctagtaaacaatgttggaaagagccacgacatccccactcctttcgcattgacttctcaggaggagatgacggacatcataaccatcaattgcatgggaaccctgcgtgctactcagttgatcgtgccgggaatgatgcagcgcaagcgtggtttgattctgacaatgggatcctttggtggccttctcccaactcctcttcttgccacctactctggtagcaaggccttcctgcagcagtggtcgacggctctcggctcggaacttgaggagcacggtatcaccgttgagctcgtacaggcatatctcatcacttctgctatgtcaaagattcgccgggccagcgctacgatcccggatccccggtcgttcgtcaagtcggtcttgtctaaaattggccgcaatggtggatctccatcctacgcttacagctcatcgccctactggagccatggcttgatggcctacttcttgacctgtatcgccggaaccatggggaagttcgttacttctaagaatcgaggaatgcacgagtcaattcggaagcgagctctgcgcaaggccgagcgcgaaaaggcgaagaagagcacttaa

SEQ ID NO: 7174 - protein, 346 aa, Aspergillus oryzae
MDFLSKHTTCLSNLELNLAPGWQTVSAYFLLAAGSLFVASRALTFVRVLLSLFVLPGKSLRSFGPKGSWAVVTGASDGLGKEFSLQLARAGFNIVLVSRTASKLTTLSDEITSKYASVQTKTLAMDFARNEDSDYEKLKALVDELDVAILVNNVGKSHDIPTPFALTSQEEMTDIITINCMGTLRATQLIVPGMMQRKRGLILTMGSFGGLLPTPLLATYSGSKAFLQQWSTALGSELEEHGITVELVQAYLITSAMSKIRRASATIPDPRSFVKSVLSKIGRNGGSPSYAYSSSPYWSHGLMAYFLTCIAGTMGKFVTSKNRGMHESIRKRALRKAEREKAKKST

SEQ ID NO: 7175 - DNA, 1026 bp, Schizosaccharomyces pombe
  CDS (1)..(1026)
atggacggagaagttcttgcaaacaaatcttgctgtggtgcagtagtaactgcattttcagtaattggtattgtgtttacaatccttaaatttacatcttttgccagtttcgtttataagacgttctttgccaaaggtgtcaagctgtctgtttacggagccaagaaaggttattgggcggttgttacaggtgctactgatggaatcggtaaagagtatgctactcaattagccatgtctggatttaatgtggttcttataagcagaacccaagaaaagcttgatgcattagctaaagaactcgaaactgttgctaaggtcaaaactcgcactattgcaattgattacaccaaaacgaccgccgaaacttttgagaagcttcatcaagatttagtaggaactccaattacagtacttatcaacaatgttggccaatctcattatatgcctaccagttttgcggaaacaacagtgaaggaaatggatgacattatgcatataaactgctttggtactcttcacaccactaaggccgtactttctatcatgctcagagagagacagaagaatgaaaagggtccccgttgccttattttgactatgggctccttcgctggcttacttccttctccttatttgtctacttatgccggatctaaagcctttttgtctaactggtctgcttctttgggtgaggaagttaagaaacagggtatcgacgtttggtgtttcaattcttatcttgttgtatcagcgatgtcaaaagttcgtcgacctacattaacaatccctacacccaaaaagtttgttcgcgctgctttaagtagcattggtctccagcgtggaggaaccaatccttacataagtcaaccatatcctagccatgccgtaatgagttggtctttggaacaattgttgggcagtgcaaaggggtttgtcgtttctcaagttgctgcaatgcacctcagcattcgtaaacgtgcacttcgaaaagaagcacgccttcaagctcaaaatcaagcctag

SEQ ID NO: 7176 - protein, 341 aa, Schizosaccharomyces pombe
MDGEVLANKSCCGAVVTAFSVIGIVFTILKFTSFASFVYKTFFAKGVKLSVYGAKKGYWAVVTGATDGIGKEYATQLAMSGFNVVLISRTQEKLDALAKELETVAKVKTRTIAIDYTKTTAETFEKLHQDLVGTPITVLINNVGQSHYMPTSFAETTVKEMDDIMHINCFGTLHTTKAVLSIMLRERQKNEKGPRCLILTMGSFAGLLPSPYLSTYAGSKAFLSNWSASLGEEVKKQGIDVWCFNSYLVVSAMSKVRRPTLTIPTPKKFVRAALSSIGLQRGGTNPYISQPYPSHAVMSWSLEQLLGSAKGFVVSQVAAMHLSIRKRALRKEARLQAQNQA

SEQ ID NO: 7177 - DNA, 939 bp, Arabidopsis thaliana
  CDS (1)..(939)
atgcagggagcatgcatctccgagagtcagccatggtatctccatttcgtatgcttcataggctttctctttctccttagagtactattcattcctctcctaaaatggttcaccacaagattcctcctcacacccaagcggctcaagcggtacggctcatgggctatggtcactggagccaccgaggggatcggacgcgcctttgctcacgagctggccaaacacggccttaacctcatcctagtcagcagaaacctttcgaagctcgaatctgtctctgatgatttccaacaagagtttccccacatcaagatcaagatcattccatttgacttctcctctgaaggaggatacggagcaatcgaggaagggataaaaggccttgaagttgggattttgataaacaacgttggtattacttatccacgcgccatgttcttccacgaggttgaccaacttacatggaccaaaatcctgagggttaatcttgaagccaccacttgggtcacacgatcactcatcggaccaatgcttcaccgccgccgtggagccatcgtcaatattagctccggcgctgccgttgttgtcccttctcatcccctctacgccatctacgctgccaccaaagcttatgtggatgcactatcaagatctctacatgtggaatataagcagtttggtattgatgtccagtgccaggttcccttatacgtgtcaacaaggatggtgtcagaagtggcagctatagacaaacctagcttatttgtaccgtcgcctgaagtctacgcaaaagcggcggtggcgcagatcggaattggatcacgttgctcgccgttttgggctcattctcttcagtggtttcttgttggacttgtaccggataaccttgttgatacttggcgtctctctatcggacttcgcagaagaagtttatcttaa

SEQ ID NO: 7178 - protein, 312 aa, Arabidopsis thaliana
MQGACISESQPWYLHFVCFIGFLFLLRVLFIPLLKWFTTRFLLTPKRLKRYGSWAMVTGATEGIGRAFAHELAKHGLNLILVSRNLSKLESVSDDFQQEFPHIKIKIIPFDFSSEGGYGAIEEGIKGLEVGILINNVGITYPRAMFFHEVDQLTWTKILRVNLEATTWVTRSLIGPMLHRRRGAIVNISSGAAVVVPSHPLYAIYAATKAYVDALSRSLHVEYKQFGIDVQCQVPLYVSTRMVSEVAAIDKPSLFVPSPEVYAKAAVAQIGIGSRCSPFWAHSLQWFLVGLVPDNLVDTWRLSIGLRRRSLS

SEQ ID NO: 7179 - DNA, 957 bp, Arabidopsis thaliana
  CDS (1)..(957)
atggagatctgcacttacttcaaatcacaacccacttggctcctcattctcttcgttctggggtcaatctcaatcttcaaattcatcttcaccctcctcagatctttctacatctacttcctccgaccatccaaaaacctccgccgatacggttcatgggcaatcatcaccggaccaacagacggaatcggtaaagctttcgcctttcagttagcccagaaaggtcttaaccttatactcgttgctcgtaacccagacaagctcaaagatgtctctgattccatcagatctaagtatagtcaaactcagatcttgaccgttgtgatggatttctctggagatattgatgaaggtgtgaaacggattaaggagagtattgaaggattagatgttgggattttgattaataatgctggcatgtcttatccttatgctaagtattttcatgaggttgatgaagagttgatcaataacttgattaagatcaatgttgaaggaactactaaagttactcaagctgtgttgcctaatatgcttaagaggaagaaaggtgctattattaatatgggttctggtgctgctgctcttattccttcttatcctttttactctgtttatgctggtgctaaaacgtacgtggatcagttcacaaagtgtctacatgttgagtataagaagagtgggattgatgttcaatgccaggttcccttgtatgttgcaacaaagatgacaaaaataagaagagcatccttcttagttgcatcaccagagggttacgcaaaggcagcactgcgttttgtaggctatgaagcacaatgcacaccgtactggcctcacgctctcatgggtgcagttgtctctgcattgcccgaaagcgtttttgaatcatttaacatcaagagatgcctccagatccggaagaagggtctccaaaaagactccatgaagaaagaatga

SEQ ID NO: 7180 - protein, 318 aa, Arabidopsis thaliana
MEICTYFKSQPTWLLILFVLGSISIFKFIFTLLRSFYIYFLRPSKNLRRYGSWAIITGPTDGIGKAFAFQLAQKGLNLILVARNPDKLKDVSDSIRSKYSQTQILTVVMDFSGDIDEGVKRIKESIEGLDVGILINNAGMSYPYAKYFHEVDEELINNLIKINVEGTTKVTQAVLPNMLKRKKGAIINMGSGAAALIPSYPFYSVYAGAKTYVDQFTKCLHVEYKKSGIDVQCQVPLYVATKMTKIRRASFLVASPEGYAKAALRFVGYEAQCTPYWPHALMGAVVSALPESVFESFNIKRCLQIRKKGLQKDSMKKE

SEQ ID NO: 7181 - DNA, 978 bp, Oryza sativa
  CDS (1)..(978)
atggccggcacgtgcgcgcacgccgagttcttccgcgcgcagccggcgtgggcgctggcgctggcgggcgtcggcctcctcgccgccgcccgcgccgcgctccgcctcgcgctctggctctacgccgcgttcctccgcccggggaagcccctgcgccgccgctacggcgcctgggcggtcgtcacgggcgccaccgacggcatcggccgcgccatggcgttccgcctcgccgcctcggggctcggcctcgtcctcgtcggccggagccccgacaagctggcctcggtctccgaggagatcagggggaggtaccccagggtggaggtgcggacgttcgtgctcgacttcgccgccgacggcctcgccgccggggtggaggggctcagggaggccatccgtgggctcgaggtgggcgtgctcgtcaacaacgccggtgtctcgtacccgtacgcccgctacctccacgaggtggacgaggagctcatgcgcaccctgatccgggtcaacgtcgagggcctcacgcgggtcacgcacgccgtgctcccggccatggtggagaggaagcgcggcgccatcgtcaacatcggctccggctcctcctccgtcatgccgtccgatccgctctactccgtctacgccgccaccaaagcttacgttgaccaattctcaagatgcctttatgttgagtacaagagcaagggtattgatgtgcaatgccaggtgcccttgtatgtggcaacaaagatggcctctatcaggaaatcctcgttctttgtcccatccgcggacacctacgcccgtgctgccattcgtcacataggctatgagccgaggtgcacaccgtactggccacactctgtaatgtggttcctgatctccattctccccgagtcactcattgacagcattcgcctgggaatgtgcatcaagatccgcaagaaggggcaagccaaagatgctaagaagaaagcgcagtga

SEQ ID NO: 7182 - protein, 325 aa, Oryza sativa
MAGTCAHAEFFRAQPAWALALAGVGLLAAARAALRLALWLYAAFLRPGKPLRRRYGAWAVVTGATDGIGRAMAFRLAASGLGLVLVGRSPDKLASVSEEIRGRYPRVEVRTFVLDFAADGLAAGVEGLREAIRGLEVGVLVNNAGVSYPYARYLHEVDEELMRTLIRVNVEGLTRVTHAVLPAMVERKRGAIVNIGSGSSSVMPSDPLYSVYAATKAYVDQFSRCLYVEYKSKGIDVQCQVPLYVATKMASIRKSSFFVPSADTYARAAIRHIGYEPRCTPYWPHSVMWFLISILPESLIDSIRLGMCIKIRKKGQAKDAKKKAQ

SEQ ID NO: 7183 - DNA, 987 bp, Oryza sativa
  CDS (1)..(987)
atggctggtcatgtcttcatgattcggcaagaatcggcgccgccggcgccaccgtggtggttcctctctctggtcttcctcggcgctgcctatgtcgccaccgtcaccctccgcctcctcgcctacctcgcgttctccctgcaccgtcagcccaaggacctccgcagccggtacggtgcgtgggcggtcattactgggccgacatccggcatgggccgggctatggcgctagagctcgctcgccgcggcctcaacctcgtgctcgtcggccgtgaccccgccaacctcgaggagatctccaacacggtcaggtctctccacggggtggagaccaagaccgtggtgttcgacctctcactcgtggcgactccccacggcgacgagccgctgcggcagctcagggagacggtggaggggctggatgtcggggtgttaatgaacaacgccggtgtgggggagccggctatggcgtacctacacgaggcggacgtggaggcgtgggtgagaatgatgcgggtgaacctgtgggcagtgacggaggtgacggcggcggtgctgccagggatggtggagcggggcaggggcgctgttgttaacatcggctcggcatcatcgcaggccatcccttccttccccctctgcaccatttactccgccaccaaacggcacgtacatgcaacaaacacacgggtagggattatggctgttcgtttgtaccggtacgtggctcatttctcccggagccttcacctcgagtacgcaagtgaagggatccatgtgcaatgccaggcgccgttcttcgtggcgacgaggatggtggagaacctggcggaggcgaggcgcctctcgccgttcacgccacctggagcagaggacgacgttgtctcagcaaatcagagcgtcgggggcgccggcgccgtcgtgacagcaggaagttcattcttggcgcttcgtcttgcgttcatgaacaataatagtgggcagtag

SEQ ID NO: 7184 - protein, 328 aa, Oryza sativa
MAGHVFMIRQESAPPAPPWWFLSLVFLGAAYVATVTLRLLAYLAFSLHRQPKDLRSRYGAWAVITGPTSGMGRAMALELARRGLNLVLVGRDPANLEEISNTVRSLHGVETKTVVFDLSLVATPHGDEPLRQLRETVEGLDVGVLMNNAGVGEPAMAYLHEADVEAWVRMMRVNLWAVTEVTAAVLPGMVERGRGAVVNIGSASSQAIPSFPLCTIYSATKRHVHATNTRVGIMAVRLYRYVAHFSRSLHLEYASEGIHVQCQAPFFVATRMVENLAEARRLSPFTPPGAEDDVVSANQSVGGAGAVVTAGSSFLALRLAFMNNNSGQ

SEQ ID NO: 7185 - DNA, 1020 bp, Oryza sativa
  CDS (1)..(1020)
atggagtccgtggtggtggccggagatctggccgctgcaccggcgccggcgacgccgatgtggttcgtggcgctggtcgccgtcggcctgcacgcggcggtcgtgtgggcggggacgttcctcgcgtggctccgccgcgcgttcctccggcccgggaagggcctgtgccggcggtacggcgagtgggcggtggtcaccggcgccaccgacggcatcggacgcgcggtggcgctggagctggctcgccgcgggctccacctcgtgctcgtggggcggaaccccgggaagctgtcgggcgtctgcaaggaggtccgcgcagcggcgccggcgtgcaaggtgaggaccgtggtgttcgacctcgccgccccaggggacgacgacgtcgggggcggcgagctgtcccgcggcgtggcgagggtggcggcggccgtggaggggctcgacgtggggctgctcgtgaacaacgccggcgcgacgtacccgtgcgcggcgtacttccacgaggtgcccgacgcggtctgggaggcggtgctgcgggtgaacgtggtggcggcgacgaggatcgcgcgcgccctcgtgccggccatggcggcgaaggggaggggtgccgtcgtcaacgtcggctccggctcctccgtcgtcgtgccggcgttcccgctctacgccgtgtacgcagcgaccaaagcgtatgttgaccaattgtctcgaagtctacatgttgaatacaagcatcacggagtggatgtgcaatgccagataccattatatgtcgccacaaagatgtcacctgtccagggtaactcgccgtttataccatcacccgaggagtacgccaaggctgctgtccgctgcatcggttatgagccaagatgtgtcccctactggcgccactcgatccagtggttctttgcatctctactgccagattctgttctgaatctatggcgtctccaggttggaatccggaagagaaatcagatgaaggttctgcttggtgagagcgatcatggattcagttaa

SEQ ID NO: 7186 - protein, 339 aa, Oryza sativa
MESVVVAGDLAAAPAPATPMWFVALVAVGLHAAVVWAGTFLAWLRRAFLRPGKGLCRRYGEWAVVTGATDGIGRAVALELARRGLHLVLVGRNPGKLSGVCKEVRAAAPACKVRTVVFDLAAPGDDDVGGGELSRGVARVAAAVEGLDVGLLVNNAGATYPCAAYFHEVPDAVWEAVLRVNVVAATRIARALVPAMAAKGRGAVVNVGSGSSVVVPAFPLYAVYAATKAYVDQLSRSLHVEYKHHGVDVQCQIPLYVATKMSPVQGNSPFIPSPEEYAKAAVRCIGYEPRCVPYWRHSIQWFFASLLPDSVLNLWRLQVGIRKRNQMKVLLGESDHGFS

SEQ ID NO: 7187 - DNA, 987 bp, Brassica napus
  CDS (1)..(987)
atgctgactctactcttctcctctctcggactcctcctgcttctcggtcttctcctcaaattcgcattcgccgatggggatttaacgctgatttcgaagaagcatgtgaaacgagaagccatagaaggaaaggtggtttggatcacaggggctagccgtggaattggagaagttcttgctaaacagtttgcgagtttaggtgccaagcttattctctctgctaggaacgaagctgagttggttcgtgttaagagtgagctcaaaggtaagtatgcaccagaagatgtcaaggttttgcctttagatctagctagcggcgaagagggtctcaaaggtgttgtagagagagcagtgtcgcttttccctggggctggggttgattatttggttcacaacgctgcctatgagcgtccgaaatcaaatgcagtggatgcgagtgaggaaaatcttaagactacattcgaggttaatgtatttgggaccatatctctcacaaagttggtaactcctcatatgctgaaacaaggaggcggtcattttgttgtgattagcagtgccgcagggaaggtaccatcacctggacaggctatatatgctgcttcaaagcatgctctgcagggctatttccacagcttacgttctgagttttttcagaagggaatcaaggttactgttgtttgcccgggtccaatagagacctcaaatggtacaggaacatcaacttcggaagacaagaagtctcctgagaagcgtgtgtcatctgaacgatgtgcagaactgaccataatcgctgcatctcataacttaaaagaagcttggatttcatatcagccagtactgctcgtgatgtatctagtgcagtacatgcctttccttggcttctggcttatggacaaggttggaggaaaacgtgtggaggttgctgagaagaaaggcaacacatactcatggaacttgctcttccagaagaagactaaaacaaactga

SEQ ID NO: 7188 - protein, 328 aa, Brassica napus
MLTLLFSSLGLLLLLGLLLKFAFADGDLTLISKKHVKREAIEGKVVWITGASRGIGEVLAKQFASLGAKLILSARNEAELVRVKSELKGKYAPEDVKVLPLDLASGEEGLKGVVERAVSLFPGAGVDYLVHNAAYERPKSNAVDASEENLKTTFEVNVFGTISLTKLVTPHMLKQGGGHFVVISSAAGKVPSPGQAIYAASKHALQGYFHSLRSEFFQKGIKVTVVCPGPIETSNGTGTSTSEDKKSPEKRVSSERCAELTIIAASHNLKEAWISYQPVLLVMYLVQYMPFLGFWLMDKVGGKRVEVAEKKGNTYSWNLLFQKKTKTN

SEQ ID NO: 7189 - DNA, 987 bp, Brassica napus
  CDS (1)..(987)
atgctgactctactcttctcctctctaggactcctccttctccttggccttctcctcaaattcgcattcgccgatggggatttaaccctgatttcgaagaagcatgcgaaacgtgaagccatagaaggcaaggtggtttggatcacaggggctagccgtggaattggggaagttcttgctaaacagtttgcaagtttaggtgccaagcttattctctctgctaggaacgaagctgaattggttcgtgttaagagtgagctcaaaggtaagtatgcaccagaagatgtcaaggttttgcctttagatctagctagcggcgtagaggggctcaaaggtgttgtagagcgggcagtgtcgcttttccctggggctggtgttgattatttggtccacaacgctgcctatgagcgtccgaaatcaaatgcagtggatgcgagtgaggagaatcttaagactacattcgaggttaatgtatttgggacaatatctctcacaaagttggtaactcctcatatgctgaaacaaggaggtggtcattttgttgtgattagcagtgccgcagggaaggtaccatcacctggacaggctatatatgctgcttcaaaacatgctctgcagggctacttccacaccttacgttctgagttctttcagaagggaatcaaggttactgttgtttgtcccggtccaatagagacctcaaatggtacaggaacatcaacttccgaagacaagaagtctcctgagaagcgcgtgtcatctgaacgatgtgcagaactgaccataatcgctgcatctcataacttaaaagaagcttggatttcatatcagccagtactgctcgtgatgtatctagtgcagtacatgcctttccttggcttctggctcatggacaaggttggaggaaaacgtgtggaggttgctgagaagaaaggcaacacatactcatggaacttgctcttccagaagaagactaaaacaaactga

SEQ ID NO: 7190 - protein, 328 aa, Brassica napus
MLTLLFSSLGLLLLLGLLLKFAFADGDLTLISKKHAKREAIEGKVVWITGASRGIGEVLAKQFASLGAKLILSARNEAELVRVKSELKGKYAPEDVKVLPLDLASGVEGLKGVVERAVSLFPGAGVDYLVHNAAYERPKSNAVDASEENLKTTFEVNVFGTISLTKLVTPHMLKQGGGHFVVISSAAGKVPSPGQAIYAASKHALQGYFHTLRSEFFQKGIKVTVVCPGPIETSNGTGTSTSEDKKSPEKRVSSERCAELTIIAASHNLKEAWISYQPVLLVMYLVQYMPFLGFWLMDKVGGKRVEVAEKKGNTYSWNLLFQKKTKTN

SEQ ID NO: 7191 - DNA, 978 bp, Triticum aestivum
  CDS (1)..(978)
atggccggcacgtgcgcccacgtcgaattcctccgcgcgcagccggcgtgggcgctggccctcgcggccgtcggcctcctcgtcgccgcccgcgccgccctgcgcctcgccctctgggtctacgccgccttcctccgccccggcaagcccctgcgccgccgctacgggccctgggccgtcgtcaccggcgccaccgacggcatcggccgcgccatcgccttccgccttgccgcctccggcctcggcctcgtgctcgtcggccgcaacccggacaagctcgccgccgtctccgaggagatcaggggcaagtaccccaagaccgaggtccgcaccttcgtgctcgacttcgcttccgaggggctcgccgctggggtggaggcgctcaaggactccatccggggcctcgacgtcggcgtgctcgtcaacaacgccggggtctcgtacccgtacgcccgctacttccatgaggtggacgaggagctcatgcggagcctcatccgggtcaacgtcgagggggtaacgcgggtcacccacgccgtgctcccgggcatggtcgacaggaagcgtggcgcaatcgtcaacatcggctccggtgctgcctctgttgtgccgtccgatccactctactccgtctacgccgccacgaaagcgtacgttgaccagttctcaagatgcctctatgttgagtacaagggcaagggcattgatgtgcaatgccaggtgcccttgtacgtggcgacaaagatggcatcaatcaggaggtcttccttctttgtgccatccgcggacacctatgctcgtgctgctattcgccacattggctatgagccgaggtgcacaccgtactggccacactctgttctgtggttcttgatctcccttctcccagagtcacttgtggatagtacacgcctcagcatgtgcatcaagatccgcaagaaggggcaggctaaggatgccaagaagaaagcgcagtga

SEQ ID NO: 7192 - protein, 325 aa, Triticum aestivum
MAGTCAHVEFLRAQPAWALALAAVGLLVAARAALRLALWVYAAFLRPGKPLRRRYGPWAVVTGATDGIGRAIAFRLAASGLGLVLVGRNPDKLAAVSEEIRGKYPKTEVRTFVLDFASEGLAAGVEALKDSIRGLDVGVLVNNAGVSYPYARYFHEVDEELMRSLIRVNVEGVTRVTHAVLPGMVDRKRGAIVNIGSGAASVVPSDPLYSVYAATKAYVDQFSRCLYVEYKGKGIDVQCQVPLYVATKMASIRRSSFFVPSADTYARAAIRHIGYEPRCTPYWPHSVLWFLISLLPESLVDSTRLSMCIKIRKKGQAKDAKKKAQ

SEQ ID NO: 7193 - DNA, 1775 bp, Brassica napus
  CDS (594)..(1553)
cggcacgaggcgagtttttttttttttttttttcgtacaacaaaagtttcttgaattgggccaacagcgaaacataaacgtataattatatttacaacgctttgtttgcttacacaccaggctccatcactgtttcttttgagtagctgtatctttaaacgaaaaaacaagaagatgaagttcaaacgtgatcgtgaccgtccaaataatcatacactgatatattcaacgcacctccattctcacaatacgccgtcgttgtatctccattcccagagttcccggacgcgtgatcacagctgttaacgattccggcgtcaacggccattccggcattagaagcagcttgctggatagacctcggcgaagtcttggaaactatggaaggaggaagcaagtgagggaagttgagagattcgagcgagtttggttggtgtaaacagtagaaagccacgtcgtgcgccacggctgcgccttccgccgtggagaatgagcctaaccagagacggtcgcgagttcccggaactcgaatctccgatacccatttcccccatttccggcgacggatgcctttgtactttgattgagtttcgatggagatctgcacttacttcaaatcccagcccacatggctcctcgtcctcttctccctcggctccatctccatcctcaggttcaccctcaccctcctcacatccctctacatctacttcctccgccccggcaagaacctccgccgctacggatcctgggccatcatcaccggccccaccgacggcatcggcaaagccttcgcctttcagctcgcccagaaaggcctccacctcgtcctcgtcgcccgcaaccccgacaagctcaaagccgtctccgactcgatccaagccaagcacagcaccacccagatcaagaccgtcctgatggacttctccggagacatcgacgcaggcgtgaggcggatcaaggaggcgatcgaaggtctggaggttgggattctgatcaacaacgctggggtttcgtacccttacgctaagtacttccacgaggttgatgaggagctgcttggtaacttgattaagatcaatgtcgaggggactaccaaggttactcaggctgtgttggtgaatatgctgaagaggaagaggggagctattgttaacatggggtctggtgctgctgctcttatcccttcctatcctttctactctgtttatgccggcgctaaaacgtatgtggatcagttctcaaggtgtctccatgttgagtacaagaaaagtgggattgatgttcaatgccaggtacccttgtatgttgctacgaagatgaccaagataagaagagcatctttcttagtggcatctccagagggttacgcaaaggcagcactgcgttttgtaggctacgaaccacgttgcacaccttactggcctcacgctctcatgggttatgttgtctctgcattgcccgaaagtgtttttgaatcctttaacattaagaggtgtctccagatccggaagaagggcatgcttaaggactccagtagtaaaaaggagtaaaaacttttcgagggtgcatgattttcttctgcagcacttggtttcttgcaagtttctgtttagacttttgcaagacttgtacgctttagtttccgatgtttccaaggttgtttccttattttgaaaattaaaaaccataacgtccactaaaaaaaaaaaaaaaaaagcggccgctttaaaggatccaactttacgtccgcgggcatgcaacgcattagtttt

SEQ ID NO: 7194 - protein, 319 aa, Brassica napus
MEICTYFKSQPTWLLVLFSLGSISILRFTLTLLTSLYIYFLRPGKNLRRYGSWAIITGPTDGIGKAFAFQLAQKGLHLVLVARNPDKLKAVSDSIQAKHSTTQIKTVLMDFSGDIDAGVRRIKEAIEGLEVGILINNAGVSYPYAKYFHEVDEELLGNLIKINVEGTTKVTQAVLVNMLKRKRGAIVNMGSGAAALIPSYPFYSVYAGAKTYVDQFSRCLHVEYKKSGIDVQCQVPLYVATKMTKIRRASFLVASPEGYAKAALRFVGYEPRCTPYWPHALMGYVVSALPESVFESFNIKRCLQIRKKGMLKDSSSKKE

SEQ ID NO: 7195 - DNA, 966 bp, Glycine max
  CDS (1)..(963)
atggaatgctgcataatctccaggctcaagacccaacccatatggttcgcgcttctctttattgtgggattgttaacgattctcaaattggcattcgttgttctcagatgggtctacgtcaatttcctcagaccaccgaagaatctcaaaaagtacggatcttgggccgtggttactggacccaccgacggcattggaaagagcttcgccttcgagctcgctcgcaagggcttgaacctcgtccttgtcggaagaaaccccgacaagctcaaagacgtgtcggattccatcgcggcgaggttcggaaaaaccgaggttaagaccgtcgtggttgatttcttcggggatctggacgagggcgtcaagaagatcagcgaagcgattcaagggttggaagttggagtgctcgttaacaatgtgggtgtttcgtacccttacgcgagattcttccatgaagtggacgaggggcttcttaacaaccttattaagcttaacgttgttggaactactaaggtaacgcaagctgttcttcccgggatgctgaagagaaagaagggtgcgattgttaacatgggttctggagctgctattgttattccttcggatcctctttatgctgtttatgctgccaccaaagcgtacatcgatcagttttcgagatgtctctatgttgaatacaagaggagtggaattgacgttcagtgtcaggttccattatatgtggcaaccaagatggcatcaatcaggaaatcttcattctttgttccatcaacagatggctatgccaaagcaggtgtgaaatggataggctatgagcctcgctgcacaccatactggccgcatactcttctttgggccgtggcgtgctcattgcctgagtttgtcgtcgatgcttggcgcctgtggttttgcttgggtattcgaaagaggggacagcgcaaggattccatgaagaaggaataaaag

SEQ ID NO: 7196 - protein, 320 aa, Glycine max
MECCIISRLKTQPIWFALLFIVGLLTILKLAFVVLRWVYVNFLRPPKNLKKYGSWAVVTGPTDGIGKSFAFELARKGLNLVLVGRNPDKLKDVSDSIAARFGKTEVKTVVVDFFGDLDEGVKKISEAIQGLEVGVLVNNVGVSYPYARFFHEVDEGLLNNLIKLNVVGTTKVTQAVLPGMLKRKKGAIVNMGSGAAIVIPSDPLYAVYAATKAYIDQFSRCLYVEYKRSGIDVQCQVPLYVATKMASIRKSSFFVPSTDGYAKAGVKWIGYEPRCTPYWPHTLLWAVACSLPEFVVDAWRLWFCLGIRKRGQRKDSMKKE

SEQ ID NO: 7197 - DNA, 1791 bp, Glycine max
  CDS (162)..(1124)
ttctacttaaatctggtggttttccgctcatctacctcacccacacttctctctctctatcataaattcaatgctctcatcgttttccctcataaaccgctttctcgtgttgtaacacactcatcactcatcatattcattcacacttcccactttccaatatggaatgctgcataatcgccaggctcaagacccaacctttatggttcgcgctgctcttcgttgtcggattgttaacgattctcaaattggctttcgttgttttcagatgggtctacgtcaatttcctccgaccaccgaagaatctcaaaaagtacggatcttgggcagtggttactggacccactgacggcattggaaagagcttcgctttcgagctcgctcgcaagggcctgaacctcgtccttgtcggaaggaaccccgacaagctcaaagacgtgtcggattcgatcgcggcgaagttcagaagaaccgaggttaagaccgtcgtggttgacttctccggggatctggacgagggcgtgaagaagattagcgaagcgattgaagggttggaagttggagtgctcgttaacaatgtgggagtttcgtatccttacgcgaggttcttccacgaagtggacgaagggcttctcaacaaccttattaaggttaacgttgttggaaccactaaggtcacgcaagctgttctgcccgggatgctgaagagaaagaagggtgcgattgttaacatgggttctggagctgctattgttattccttcggatcctctttatgctgtttatgctgccaccaaagcgtacatcgatcagttttcgagatgtctctatgttgaatacaagaggagtggaattgacgttcagtgtcaggttccattatatgtggcaaccaagatggcatcaatcaggaaatcttcattctttgttccatcaacagatggctatgccaaagcaggtgtgaaatggataggctatgagcctcgctgcacaccatactggccgcatactcttctttgggccgtggcgtgctcattgcctgagtttgtcgtcgatgcttggcgcctgtggttttgcttgggtattcgaaagaggggacagcgcaaggattccatgaagaaggaataaaaggatgcttggttctgctgtgtaggcaaatagatgctctactcatctcatacatatgcagattgttagctgattaaggattccaagttcctgctgcgttcctgattttcatcatactgttgttactcttttgtgctagtatcagttgtgtggcatattctttttactcacccgttttgggtgtttctgttcactgttttagtagtgtgttgaactgatatgatatattggcatatcgcttaacctggttttctctggtgtcattccttccttttctcttattctgagcttttgggaagcctttgtgcttcaagtgaaaactgagccaggaaattaaactggaataaatgattgatcacattttgaattaaaaaaaaaaaaaaaaaaaaaaaaaaaaaaaaaaaaaaaaaaaaaaaaaaaaaaaaaaaaaaaaaaaaaaaaaaaaaaaaaaaaacctcggggggggccccggcccccatttcccccttttggggggggttatacccccccctccttgcccgtggtttaccatcgtggggacgggaaaaccctgggggttccccacttaattcgcttggcaccaaatccccttttccccagttgggtaaaaaccaaaagggcccgcccggtccgcctttccaaaaatttgcccaccttgatgggcaat

SEQ ID NO: 7198 - protein, 320 aa, Glycine max
MECCIIARLKTQPLWFALLFVVGLLTILKLAFVVFRWVYVNFLRPPKNLKKYGSWAVVTGPTDGIGKSFAFELARKGLNLVLVGRNPDKLKDVSDSIAAKFRRTEVKTVVVDFSGDLDEGVKKISEAIEGLEVGVLVNNVGVSYPYARFFHEVDEGLLNNLIKVNVVGTTKVTQAVLPGMLKRKKGAIVNMGSGAAIVIPSDPLYAVYAATKAYIDQFSRCLYVEYKRSGIDVQCQVPLYVATKMASIRKSSFFVPSTDGYAKAGVKWIGYEPRCTPYWPHTLLWAVACSLPEFVVDAWRLWFCLGIRKRGQRKDSMKKE

SEQ ID NO: 7199 - DNA, 1475 bp, Glycine max
  CDS (162)..(1124)
  misc_feature (1454)..(1454): n is a, g, c or t
  misc_feature (1455)..(1455): n is a, g, c or t
  misc_feature (1456)..(1456): n is a, g, c or t
  misc_feature (1457)..(1457): n is a, g, c or t
  misc_feature (1458)..(1458): n is a, g, c or t
  misc_feature (1459)..(1459): n is a, g, c or t
  misc_feature (1460)..(1460): n is a, g, c or t
  misc_feature (1461)..(1461): n is a, g, c or t
  misc_feature (1462)..(1462): n is a, g, c or t
  misc_feature (1463)..(1463): n is a, g, c or t
ttctacttaaatctggtggttttccgctcatctacctcacccacacttctctctctctatcataaattcaatgctctcatcgttttccctcataaaccgctttctcgtgttgtaacacactcatcactcatcatattcattcacacttcccactttccaatatggaatgctgcataatcgccaggctcaagacccaacctttatggttcgcgctgctcttcgttgtcggattgttaacgattctcaaattggctttcgttgttttcagatgggtctacgtcaatttcctccgaccaccgaagaatctcaaaaagtacggatcttgggcagtggttactggacccactgacggcattggaaagagcttcgctttcgagctcgctcgcaagggcctgaacctcgtccttgtcggaaggaaccccgacaagctcaaagacgtgtcggattcgatcgcggcgaagttcagaagaaccgaggttaagaccgtcgtggttgacttctccggggatctggacgagggcgtgaagaagattagcgaagcgattgaagggttggaagttggagtgctcgttaacaatgtgggagtttcgtatccttacgcgaggttcttccacgaagtggacgaggggcttctcaacaaccttattaaggttaacgttgttggaaccactaaggtcacgcaagctgttctgccagggatgctcaggagaaagaagggggcgattgttaacattggttctggagctgctattgttattccttctgatcctctttatgctgtttatgctgccaccaaagcgtacatcgatcagttttcgagatgtctctatgttgaatacaagaggagtggaattgacgttcagtgtcaggttccattatatgtggcaaccaagatggcatcaatcaggaaatcttcattctttgttccatcaacagatggctatgccaaagcaggtgtgaaatggataggctatgagcctcgctgcacaccatactggccgcatactcttctttgggccgtggcgtgctcattgcctgagtttgtcgtcgatgcttggcgcctgtggttttgcttgggtattcgaaagaggggacagcgcaaggattccatgaagaaggaataaaaggatgcttggttctgctgtgtaggcaaatagatgctctactcatctcatacatatgcagattgttagctgattaaggattccaagttcctgctgcgttcctgattttcatcatactgttgttactcttttgtgctagtatcagttgtgtggcatattctttttactcacccgttttgggtgtttctgttcactgttttagtagtgtgttgaactgatatgatatattggcatatcgcttaacctggttttctctggtgtcattccttccttttctcttattctgagcttttgggaagcctttgtgcttcaagtgaaaaaaaaaaaaannnnnnnnnnaaaaaaaaaaaa

SEQ ID NO: 7200 - protein, 320 aa, Glycine max
MECCIIARLKTQPLWFALLFVVGLLTILKLAFVVFRWVYVNFLRPPKNLKKYGSWAVVTGPTDGIGKSFAFELARKGLNLVLVGRNPDKLKDVSDSIAAKFRRTEVKTVVVDFSGDLDEGVKKISEAIEGLEVGVLVNNVGVSYPYARFFHEVDEGLLNNLIKVNVVGTTKVTQAVLPGMLRRKKGAIVNIGSGAAIVIPSDPLYAVYAATKAYIDQFSRCLYVEYKRSGIDVQCQVPLYVATKMASIRKSSFFVPSTDGYAKAGVKWIGYEPRCTPYWPHTLLWAVACSLPEFVVDAWRLWFCLGIRKRGQRKDSMKKE

SEQ ID NO: 7201 - DNA, 25 bp, Artificial sequence
  primer
atgacttttatgcaacagcttcaag

SEQ ID NO: 7202 - DNA, 25 bp, Artificial sequence
  primer
ctattcctttttaacctgtcttgcg

SEQ ID NO: 7203 - protein, 367 aa, Artificial sequence
  consensus sequence
  Variant (2)..(18): Xaa in position 2 to 18 is any amino acid
  Variant (19)..(19): Xaa in position 19 is any or no amino acid
  Variant (21)..(30): Xaa in position 21 to 30 is any amino acid
  Variant (31)..(34): Xaa in position 31 to 34 is any or no amino acid
  Variant (36)..(36): Xaa in position 36 is any amino acid
  Variant (39)..(40): Xaa in position 39 to 40 is any amino acid
  Variant (43)..(44): Xaa in position 43 to 44 is any amino acid
  Variant (49)..(51): Xaa in position 49 to 51 is any amino acid
  Variant (53)..(55): Xaa in position 53 to 55 is any amino acid
  Variant (57)..(58): Xaa in position 57 to 58 is any amino acid
  Variant (60)..(63): Xaa in position 60 to 63 is any amino acid
  Variant (65)..(66): Xaa in position 65 to 66 is any amino acid
  Variant (68)..(70): Xaa in position 68 to 70 is any amino acid
  Variant (73)..(92): Xaa in position 73 to 92 is any amino acid
  Variant (93)..(95): Xaa in position 93 to 95 is any or no amino acid
  Variant (97)..(112): Xaa in position 97 to 112 is any amino acid
  Variant (113)..(123): Xaa in position 113 to 123 is any or no amino acid
  Variant (125)..(125): Xaa in position 125 is any amino acid
  Variant (126)..(126): Xaa in position 126 is any or no amino acid
  Variant (128)..(129): Xaa in position 128 to 129 is any amino acid
  Variant (131)..(131): Xaa in position 131 is any amino acid
  Variant (134)..(134): Xaa in position 134 is any amino acid
  Variant (136)..(143): Xaa in position 136 to 143 is any amino acid
  Variant (145)..(157): Xaa in position 145 to 157 is any amino acid
  Variant (158)..(158): Xaa in position 158 is any or no amino acid
  Variant (160)..(166): Xaa in position 160 to 166 is any amino acid
  Variant (168)..(171): Xaa in position 168 to 171 is any amino acid
  Variant (173)..(173): Xaa in position 173 is any amino acid
  Variant (175)..(179): Xaa in position 175 to 179 is any amino acid
  Variant (180)..(193): Xaa in position 180 to 193 is any or no amino acid
  Variant (195)..(195): Xaa in position 195 is any amino acid
  Variant (197)..(199): Xaa in position 197 to 199 is any amino acid
  Variant (202)..(208): Xaa in position 202 to 208 is any amino acid
  Variant (209)..(210): Xaa in position 209 to 210 is any or no amino acid
  Variant (212)..(215): Xaa in position 212 to 215 is any amino acid
  Variant (217)..(219): Xaa in position 217 to 219 is any amino acid
  Variant (221)..(226): Xaa in position 221 to 226 is any amino acid
  Variant (227)..(244): Xaa in position 227 to 244 is any or no amino acid
  Variant (246)..(247): Xaa in position 246 to 247 is any amino acid
  Variant (249)..(250): Xaa in position 249 to 250 is any amino acid
  Variant (252)..(255): Xaa in position 252 to 255 is any amino acid
  Variant (260)..(266): Xaa in position 260 to 266 is any amino acid
  Variant (267)..(278): Xaa in position 267 to 278 is any or no amino acid
  Variant (280)..(282): Xaa in position 280 to 282 is any amino acid
  Variant (284)..(288): Xaa in position 284 to 288 is any amino acid
  Variant (289)..(293): Xaa in position 289 to 293 is any or no amino acid
  Variant (295)..(297): Xaa in position 295 to 297 is any amino acid
  Variant (299)..(311): Xaa in position 299 to 311 is any amino acid
  Variant (312)..(312): Xaa in position 312 is any or no amino acid
  Variant (314)..(319): Xaa in position 314 to 319 is any amino acid
  Variant (320)..(326): Xaa in position 320 to 326 is any or no amino acid
  Variant (329)..(330): Xaa in position 329 to 330 is any amino acid
  Variant (332)..(352): Xaa in position 332 to 352 is any amino acid
  Variant (353)..(360): Xaa in position 353 to 360 is any or no amino acid
  Variant (362)..(366): Xaa in position 362 to 366 is any amino acid
GXXXXXXXXXXXXXXXXXXFXXXXXXXXXXXXXXGXWAXXTGXXDGIGXXXAXXXAXXGXXXXLXXRXXXKLXXXXXXXXXXXXXXXXXXXXXXXDXXXXXXXXXXXXXXXXXXXXXXXXXXXLXXVXXLXNNXGXXXXXXXXFXXXXXXXXXXXXXXNXXXXXXXTXXXXPXMXXXXXXXXXXXXXXXXXXXGXIXXXGSXXXXXXXXXPXXXXYXXXKXXXXXXXXXXXXXXXXXXXXXXXXSXXLXXEXXXXGIDVXXXXXXXXXXXXXXXXXXXVXXXMXXXXXXXXXXSXXXPXXXXXXXXXXXXXXGXXXXXXXXXXXXXPYXXHXXXXXXXXXXXXXXXXXXXXXXXXXXXXXRXXXXXK

SEQ ID NO: 7204 - protein, 31 aa, Artificial sequence
  protein pattern
  Variant (2)..(3): Xaa in position 2 to 3 is any amino acid
  Variant (6)..(6): Xaa in position 6 is Ile or Leu
  Variant (8)..(8): Xaa in position 8 is Lys or Arg
  Variant (9)..(9): Xaa in position 9 is Ala, Glu or Ser
  Variant (10)..(10): Xaa in position 10 is any amino acid
  Variant (12)..(12): Xaa in position 12 is any amino acid
  Variant (13)..(13): Xaa in position 13 is Glu, Gln or Arg
  Variant (14)..(14): Xaa in position 14 is Phe, Ile, Leu or Met
  Variant (16)..(17): Xaa in position 16 to 17 is any amino acid
  Variant (19)..(20): Xaa in position 19 to 20 is any amino acid
  Variant (21)..(22): Xaa in position 21 to 22 is Ile, Leu or Val
  Variant (24)..(24): Xaa in position 24 is Ile or Val
  Variant (25)..(25): Xaa in position 25 is Ala, Gly or Ser
  Variant (27)..(27): Xaa in position 27 is Asn, Ser or Thr
  Variant (28)..(29): Xaa in position 28 to 29 is any amino acid
GXXDGXGXXXAXXXAXXGXXXXLXXRXXXKL

SEQ ID NO: 7205 - protein, 26 aa, Artificial sequence
  protein pattern
  Variant (2)..(4): Xaa in position 2 to 4 is any or no amino acid
  Variant (6)..(6): Xaa in position 6 is Ala or Ser
  Variant (7)..(7): Xaa in position 7 is Phe or Tyr
  Variant (8)..(8): Xaa in position 8 is Ile, Leu or Val
  Variant (9)..(9): Xaa in position 9 is Ala, Asp, Gln or Ser
  Variant (10)..(11): Xaa in position 10 to 11 is any amino acid
  Variant (13)..(13): Xaa in position 13 is any amino acid
  Variant (14)..(14): Xaa in position 14 is Ala, Cys or Ser
  Variant (15)..(17): Xaa in position 15 to 17 is any amino acid
  Variant (19)..(23): Xaa in position 19 to 23 is any amino acid
  Variant (24)..(24): Xaa in position 24 is Ile or Val
  Variant (25)..(25): Xaa in position 25 is Asp or Thr
  Variant (26)..(26): Xaa in position 26 is Ile or Val
YXXXKXXXXXXSXXXXXEXXXXXXXX

SEQ ID NO: 7206 - protein, 26 aa, Artificial sequence
  protein pattern
  Variant (2)..(2): Xaa in position 2 is Asp, Glu or Pro
  Variant (3)..(3): Xaa in position 3 is Ile or Val
  Variant (4)..(4): Xaa in position 4 is Ala, Gly, Ser or Thr
  Variant (5)..(5): Xaa in position 5 is Ile, Leu or Val
  Variant (7)..(7): Xaa in position 7 is Ile or Val
  Variant (9)..(9): Xaa in position 9 is Gly, Asn or Ser
  Variant (10)..(10): Xaa in position 10 is Ala or Val
  Variant (12)..(14): Xaa in position 12 to 14 is any amino acid
  Variant (15)..(16): Xaa in position 15 to 16 is any or no amino acid
  Variant (18)..(19): Xaa in position 18 to 19 is any amino acid
  Variant (20)..(21): Xaa in position 20 to 21 is any or no amino acid
  Variant (23)..(24): Xaa in position 23 to 24 is any amino acid
  Variant (25)..(25): Xaa in position 25 is Thr or Val
  Variant (26)..(26): Xaa in position 26 is Asp, Glu, Pro, Ser or Thr
LXXXXLXNXXGXXXXXPXXXXFXXXX

SEQ ID NO: 7207 - protein, 20 aa, Artificial sequence
  protein pattern
  Variant (2)..(4): Xaa in position 2 to 4 is any amino acid
  Variant (5)..(5): Xaa in position 5 is any or no amino acid
  Variant (7)..(7): Xaa in position 7 is Asp, Gly, Asn, Ser or Thr
  Variant (8)..(8): Xaa in position 8 is Ala, Pro or Thr
  Variant (9)..(11): Xaa in position 9 to 11 is any amino acid
  Variant (12)..(12): Xaa in position 12 is Ala, Ser or Val
  Variant (13)..(13): Xaa in position 13 is any amino acid
  Variant (14)..(14): Xaa in position 14 is Ala, Ser or Thr
  Variant (15)..(15): Xaa in position 15 is Ala, Cys, Gly, Thr or Val
  Variant (16)..(18): Xaa in position 16 to 18 is any amino acid
  Variant (19)..(19): Xaa in position 19 is Ala, Ile or Val
SXXXXPXXXXXXXXXXXXXG

SEQ ID NO: 7208 - DNA, 1815 bp, Saccharomyces cerevisiae
  CDS (1)..(1815)
atgtcagatcctatagtaacgtcttccaaaatggaaaaaagtgcagagtttgaagtaacagactctgctttatataataacttcaatacatcaacaacagcttcactaactccggagattaaggaacattctgaggaatctcgcaatgggttagttcacagattcgtcgactcattcagaagagccgaaagccaacgtttagaagaagacaatgacttggaggatggtaccaaatcgatgaaatctaataaccacttaaaaaagtcaatgaaatctagacatgttgtaatgatgtctttaggtacagggataggaacaggtcttctagttgccaacgccaaaggtttgagtcttgcaggcccggggtctttagtcatcggttacgttatggtgtccttcgtcacgtattttatggtccaagcggctggtgagatgggtgtcacttatccgacgcttccaggtaacttcaatgcatacaattcaatctttatttcaaagtcgtttgggttcgcgaccacttggttattttgcattcagtggttaactgtgctaccgttggaattgattacttcttccatgaccgtcaagtactggaatgacacaattaatgctgatgtattcattgtcattttctatgtgtttttattgtttatccacttttttggtgttaaggcatacggtgaaacggaatttatcttcaattcctgtaagatattgatggttgcaggattcattattttatcagtcgtcatcaattgtgggggagccggtgtggacggctatattggcggcaaatattggcgcgaccctggttcatttgcagaaggcagcggtgccactcgtttcaaagggatatgttatattctagtatctgcatatttctccttcggtggtattgaattatttgttctttccatcaatgagcagtctaaccctagaaaatccactcctgtagccgcgaagagaagtgtatatcgtattttgatcatttatttgctgacaatgattctaattgggttcaatgttcctcacaataacgatcaattgatgggttccggtggctccgcaacgcacgcttcaccatatgtcttggcagcctctattcacaaggttagggtcatcccccatatcattaatgctgttattttgatatcagtcatctctgttgcgaactctgccctttatgccgcaccgagattaatgtgttccttggctcaacagggctatgctccaaaatttttgaactatattgatagggagggaagacctttaagggccttggtagtgtgctctcttgttggtgtcgttggcttcgtcgcctgttctccacaggaagagcaagcatttacatggttggcagccattgcaggtttgagtgaacttttcacatggtcaggcattatgctttcacacattcgattcagaaaagcgatgaaagtccaaggaagatcacttgatgaagtcggctataaggccaataccggtatatggggttcatactatggggtttttttcaatatgcttgtctttatggcccaattttgggtcgcactgtctccaataggaaatggcggaaagtgtgatgctcaggcattcttcgagagttatctggctgccccgctatggatattcatgtatgttggatacatggtttacaaaagagattttacctttttaaacccactggacaagatcgacttggactttcatagaagagtttacgaccctgaaataatgaggcaggaggacgaagaaaataaagaaaggttaaagaactcttcaatattcgtcagagtctacaaattttggtgttag

SEQ ID NO: 7209 - protein, 604 aa, Saccharomyces cerevisiae
MSDPIVTSSKMEKSAEFEVTDSALYNNFNTSTTASLTPEIKEHSEESRNGLVHRFVDSFRRAESQRLEEDNDLEDGTKSMKSNNHLKKSMKSRHVVMMSLGTGIGTGLLVANAKGLSLAGPGSLVIGYVMVSFVTYFMVQAAGEMGVTYPTLPGNFNAYNSIFISKSFGFATTWLFCIQWLTVLPLELITSSMTVKYWNDTINADVFIVIFYVFLLFIHFFGVKAYGETEFIFNSCKILMVAGFIILSVVINCGGAGVDGYIGGKYWRDPGSFAEGSGATRFKGICYILVSAYFSFGGIELFVLSINEQSNPRKSTPVAAKRSVYRILIIYLLTMILIGFNVPHNNDQLMGSGGSATHASPYVLAASIHKVRVIPHIINAVILISVISVANSALYAAPRLMCSLAQQGYAPKFLNYIDREGRPLRALVVCSLVGVVGFVACSPQEEQAFTWLAAIAGLSELFTWSGIMLSHIRFRKAMKVQGRSLDEVGYKANTGIWGSYYGVFFNMLVFMAQFWVALSPIGNGGKCDAQAFFESYLAAPLWIFMYVGYMVYKRDFTFLNPLDKIDLDFHRRVYDPEIMRQEDEENKERLKNSSIFVRVYKFWC

SEQ ID NO: 7210 - DNA, 1815 bp, Saccharomyces pastorianus
  CDS (1)..(1815)
atgtcagatccaatcgtaacgtcttccaagatggagaagactgccgagttcgaagtaacggattcggccttacgtgataactttaatgcatcaacaacagcatcattttccccagaggtaaaagagcattccgaggaatctagaagtgggttagtccataggtttgtcgattcattcagaagggctgagagccaacgcctagaagatgataatgatttggaggatggtaccaggtctatgaaatccaataaccatctgaaaaaatcgatgaaatctagacatgtcgtcatgatgtctctaggaacaggtataggcacaggtctgctggtcgccaacgccaaaggtctgaaacttgccggcccgggatctttagtcattggttatgtcttggtctccttcgtcacatatttcatggtccaggcagctggtgaaatgggtgttacctatcccacgcttccgggcaatttcaatgcgtataactcaatcttcgtttctaaatcgtttgggttcgctaccacctggttattttgcatccagtggctgaccgtgctgccgttggagttgattacttcttcgatgaccatcaagtattggaacgacaccattaatgctgatgtgtttatcgtcatcttttatgtgtttttattgttcatccatttctttggtgttaaggcttacggtgaaactgaattcatctttaattcttgcaaaattttaatgattgccgggtttatcatcctatcagtcgttatcaattgtgggggtgctggtgtggacggctacattggtggaaagtattggcgtgatcctggttcatttgcggatggtagcagtgctactcgcttcaaagggatttgctttattcttgtgactgcgtatttctcctttggtggtattgaattgtttgttctttccatcaacgaacaggccaatccaagaaaatccacgcccgtggctgccaagagaagtatttaccgtattctgatcatttatttattgacaatgattttgattggcttcaatgttcctcacgataatgaccaattgatgggttccggtagttctgctacccacgcatctccttatgtgttagcagcctcgatccatggtgtcaaagtggttccacatattatcaatgctgttattttgatatctgttctctccgttgcgaactctgctctctacgctgcaccaaggttgatgtgttctttggctcaacagggctatgcaccaaaatttttaaactatatcgatagagaaggcagacctttacgtgccctaatagcgtgctcttttgtaggtctaattggtttcgttgcttgctctccacaagaagaacaagcttttacatggttggcggccatcgcagggttgagtgaaatttttacatggtcgggcattatgctttcccatattcgtttcagactagccatgaaagcgcagggaagatcacttgatgaaattggctataggtccaatactggcatatggggttctatttatggggttcttttcaacatccttgtcttcatggcacagttctgggtagcactgtcgccaccaggttctggcgggaagtgcgatgttgaatctttcttccaaagttatcttgctgcccctctatggatctttttgtatttgggttacatggtctacacaagagatttcacctttttgaatccgttggataaaattgatttagactttcacagaagagtttacgatcctgaaataatgagacaagaggatgaagaaaacaaagaaaggctgagaaattcttcactatttttcagaatgtacaatatgtggtgttaa

SEQ ID NO: 7211 - protein, 604 aa, Saccharomyces pastorianus
MSDPIVTSSKMEKTAEFEVTDSALRDNFNASTTASFSPEVKEHSEESRSGLVHRFVDSFRRAESQRLEDDNDLEDGTRSMKSNNHLKKSMKSRHVVMMSLGTGIGTGLLVANAKGLKLAGPGSLVIGYVLVSFVTYFMVQAAGEMGVTYPTLPGNFNAYNSIFVSKSFGFATTWLFCIQWLTVLPLELITSSMTIKYWNDTINADVFIVIFYVFLLFIHFFGVKAYGETEFIFNSCKILMIAGFIILSVVINCGGAGVDGYIGGKYWRDPGSFADGSSATRFKGICFILVTAYFSFGGIELFVLSINEQANPRKSTPVAAKRSIYRILIIYLLTMILIGFNVPHDNDQLMGSGSSATHASPYVLAASIHGVKVVPHIINAVILISVLSVANSALYAAPRLMCSLAQQGYAPKFLNYIDREGRPLRALIACSFVGLIGFVACSPQEEQAFTWLAAIAGLSEIFTWSGIMLSHIRFRLAMKAQGRSLDEIGYRSNTGIWGSIYGVLFNILVFMAQFWVALSPPGSGGKCDVESFFQSYLAAPLWIFLYLGYMVYTRDFTFLNPLDKIDLDFHRRVYDPEIMRQEDEENKERLRNSSLFFRMYNMWC

SEQ ID NO: 7212 - DNA, 1476 bp, Clostridium acetobutylicum ATCC 824
  CDS (1)..(1476): transl_table=11
atgacgtctaaaaaagaacaaaagaatgagcttaagagaacactgacggcaaggcatatgaatatgatcgcaataggaggctctgttggaactggacttttttttgcaagtggaagtgcaataagcacagcaggaccaggaggagcgcttcttgcatatataatcacgggaattctagtttatgtactaatgatgtcactaggagaaatgtcaacactattacctatttcgggttcttttgaaacctatgctactagatttgtagatccagcacttggatttactcttggctggaactactggttttcttggtccatatgtgtggcatcggaattagttgcaggatcacttatagtgaagttttggtttcctcatactaatacaaccatttggagcataggatttttacttgtaatttttatactaaatattctttctgctaaagcttatggagaaagcgaatattggttttcaagtattaaggtagttactataatcatatttatcatagttggagtacttatgatatttggaattatgggaaatgattcacctggttttaaaaattgggttatatcgggaaatggttcgagagcaccgtttgtaggtggaatagcagcaattataaatgtttttttagttgcaggcttttcgttttcaggtacagaaatagttggacttgcagctggagaaacagaaaatcctgaggaaaacgtcccaaaggcaattaaatctgttttttggcgtatactactattttatatttgtgcaattataataataggctttctagttccttttaatgacaagaatctattaaaaagtggagttaataatatagcatatagtccatttacaatggtatttgcaaagtgtggaatagcttttgcggcaagtgctatgaatgctgtaattttaacctcagtactttcttgcggaaactcaggactttatgtatcatcacgtatgctatattctcttgcaaaagaaggaaaagcacctaagtttttagcaaaggtaaacaagcaaggtgtacctatgaatgcgttatatgcaacaactttagttgcatcctctgcatttttgtcatcacttattggtgaaggaaagatatactatgttttatacaatgcatctggaataacagcattgtttgcatggcttggtataggaatctgtcattacaggtttagaaaagcttatgtagcgcaaggaagagatttaaaggacttgaagtttaaggctaagttttatccttatggtcctattatggcaatagtgttatgcgtagtaataatatttggagctaacatatggatatttcaggctccaaagttcagttggtttgattttataagtaattacatttgtattcctatatttatagcactatatatagcatataaatacattaagaaaactaagctagttccgcttgaggaatgcgattttgaatataacggaaaagataaataa

SEQ ID NO: 7213 - protein, 491 aa, Clostridium acetobutylicum ATCC 824
MTSKKEQKNELKRTLTARHMNMIAIGGSVGTGLFFASGSAISTAGPGGALLAYIITGILVYVLMMSLGEMSTLLPISGSFETYATRFVDPALGFTLGWNYWFSWSICVASELVAGSLIVKFWFPHTNTTIWSIGFLLVIFILNILSAKAYGESEYWFSSIKVVTIIIFIIVGVLMIFGIMGNDSPGFKNWVISGNGSRAPFVGGIAAIINVFLVAGFSFSGTEIVGLAAGETENPEENVPKAIKSVFWRILLFYICAIIIIGFLVPFNDKNLLKSGVNNIAYSPFTMVFAKCGIAFAASAMNAVILTSVLSCGNSGLYVSSRMLYSLAKEGKAPKFLAKVNKQGVPMNALYATTLVASSAFLSSLIGEGKIYYVLYNASGITALFAWLGIGICHYRFRKAYVAQGRDLKDLKFKAKFYPYGPIMAIVLCVVIIFGANIWIFQAPKFSWFDFISNYICIPIFIALYIAYKYIKKTKLVPLEECDFEYNGKDK

SEQ ID NO: 7214 - DNA, 1461 bp, Listeria monocytogenes EGD-e
  CDS (1)..(1461): transl_table=11
gtgaaaaaagaaacacatggcgagattcgtcgtgacttaaaaacaaggcatttgtccatgattgccattggtggttcgatcgggacgggattatttttagcaagtggtaatgcgattcatactgccggacctggtggcgcgttggttgcttatgttgcaatcgggattatggtgtactttttaatgacaagtttaggcgaaatggctacttacatgcctgtatctggttcatttagtacgtatgctagtcgatttgttgacccagctttcgggtttgcacttggttggaattattggtttaactgggcaattacgctagcagtcgatatttccaccgcggcgattattgttcaattttggctaccgaatactcctgcttggctatggagcgcgattttcttaattttgatttttggcttaaatgcgctttcggtaaaagcttacggagaatcagaatattggttttcgattattaaagtggccacggttattattttccttatcgtcggcgtgctaactattgttggaattcttggcggcgaagttattggcttttctaactttacagctggcgatgctccgtttaaaggtggtttttttgccatcttaggtaccttcttaattgctggattttctttccaagggactgaaatggttggtattgcggcaggtgaaagtgctactccagaaaccagtgtgccaaaagcgattaaacaagtgttctggcggattttgttattttatatttttgcgattttcattattgggatgattattccttatactaacccgaacttacttagtgccgaggcaactgatgtggcaattagcccatttacactcgtatttgaaaaagctggtcttgcatttgcggcttcagtgatgaatgcggttatcctgacttctgttctatctgctggtaattcaggtctttacgcttccaccagaatgctttgggcgatggctcgcgataaaaaagcacctaaattcttgggaaaagtaaaccgtcgtggtattccgatggcagcattaatcgttacgacgattgttggtgccatgacattcattacaacgctaacagaaaatggcacagtaatttatacgtggttactttctgcctctggtttaactggatttatcgcttgggtcggcatcgctatcagtcattaccgtttccgaaaagcatttatcaaacaagggcatgacttaagtgaactaaaatataaagcgaaatttttcccattcggacctattttagcacttgttttatgtattttagtcattgtcggtcaagattacgcggcatttttaaaaccagaatttacgaatccggcttggtggcaaaaaatcggcatttcgtatatcggtcttcccattttcctagttttttggctatcttttaaatttacaaataaaactaaagttattccactggaagactgcaaatttgatcaaaaataa

SEQ ID NO: 7215 - protein, 486 aa, Listeria monocytogenes EGD-e
MKKETHGEIRRDLKTRHLSMIAIGGSIGTGLFLASGNAIHTAGPGGALVAYVAIGIMVYFLMTSLGEMATYMPVSGSFSTYASRFVDPAFGFALGWNYWFNWAITLAVDISTAAIIVQFWLPNTPAWLWSAIFLILIFGLNALSVKAYGESEYWFSIIKVATVIIFLIVGVLTIVGILGGEVIGFSNFTAGDAPFKGGFFAILGTFLIAGFSFQGTEMVGIAAGESATPETSVPKAIKQVFWRILLFYIFAIFIIGMIIPYTNPNLLSAEATDVAISPFTLVFEKAGLAFAASVMNAVILTSVLSAGNSGLYASTRMLWAMARDKKAPKFLGKVNRRGIPMAALIVTTIVGAMTFITTLTENGTVIYTWLLSASGLTGFIAWVGIAISHYRFRKAFIKQGHDLSELKYKAKFFPFGPILALVLCILVIVGQDYAAFLKPEFTNPAWWQKIGISYIGLPIFLVFWLSFKFTNKTKVIPLEDCKFDQK

SEQ ID NO: 7216 - DNA, 1452 bp, Lactobacillus plantarum WCFS1
  CDS (1)..(1452): transl_table=11
atggcagaaaaacaacatcaggaagtgcatcgttccttacagacgcggcatttatccatgattgcattaggtggtagtatcgggaccgggctgtttgtcgcgtccggttcggcaatttcaacggctgggccagggggagcattactggcctacgttggtattggagtgatggtttactttttaatgactagtctgggcgaaatggcaacttatttgcccgtttcaggttcgttttccacgtatgccacgaagtttgttgacccggcacttgggtttgcgatgggctggaattactggttcaactgggcaatcacgttagcggtcgatattagtacggcggcgattgtcatgcagttctggttgccatccgtgccggggtgggtttttagtctgattgcgctcgttttgatttttacgatcaacgcgctgtcagtccggtcgtttggagaaactgagtactggctttcgctaattaaagtggtgaccgtgctcgtattcttggttatcggtgtcttgacgatcgtgggaatcatgggcggtcatgccactggcctcagtaactttacctataaaaaggcaccatttgtcggtggaattccaacgattttgagtgtcttcgtggtcgctggtttttcgtttcaaggaaccgaattaattgggatcacggccggggagtcagcaacaccggagaaaagtattccggcggctattaaacaagttttctggcgtattttgttattttacattttagccattttcgtgattgcggcgattattccttatacgtcgaaagatcttctagggtcatcagcgagcgatattgccatcagtccgttcacgttagtctttaaacgggctgggttggcggctgcggccagtgtgatgaacgcagtgatcttgacgtccgtattgtcagctgctaattcggggatgtacgcctcgacacggatgttatattctttgtcattacagggttatgcccccaagacatttggtcgggtcaatcgtcgtgggattccaatcatggcattattaggaacgacggtgattggattactcacgttcttgtcgagtctattcggtgaacggatttatattttcctcgtttcggccagtgggttaacgggttttatcgcttggctaggaatcgctatttcgcatctgcgtttccgtcgcgcgtttgttaagcaggggcatcaattgagtgaattgcggtaccatgccaagtggttcccatttggcccgtggttcgcctttatcttgtgtgtcgtggtcattattggtcaagacttacattcatttgcaacgcttgattggcaggctattggggtgacctatatgagcatcccgttattcatcatcttgtatgtctattataagattcgctatcatactaagatgattccgctagacaaggttgatttgacacgcaaacgacaccatcaagattaa

SEQ ID NO: 7217 - protein, 483 aa, Lactobacillus plantarum WCFS1
MAEKQHQEVHRSLQTRHLSMIALGGSIGTGLFVASGSAISTAGPGGALLAYVGIGVMVYFLMTSLGEMATYLPVSGSFSTYATKFVDPALGFAMGWNYWFNWAITLAVDISTAAIVMQFWLPSVPGWVFSLIALVLIFTINALSVRSFGETEYWLSLIKVVTVLVFLVIGVLTIVGIMGGHATGLSNFTYKKAPFVGGIPTILSVFVVAGFSFQGTELIGITAGESATPEKSIPAAIKQVFWRILLFYILAIFVIAAIIPYTSKDLLGSSASDIAISPFTLVFKRAGLAAAASVMNAVILTSVLSAANSGMYASTRMLYSLSLQGYAPKTFGRVNRRGIPIMALLGTTVIGLLTFLSSLFGERIYIFLVSASGLTGFIAWLGIAISHLRFRRAFVKQGHQLSELRYHAKWFPFGPWFAFILCVVVIIGQDLHSFATLDWQAIGVTYMSIPLFIILYVYYKIRYHTKMIPLDKVDLTRKRHHQD

SEQ ID NO: 7218 - DNA, 1872 bp, Candida glabrata CBS 138
  CDS (1)..(1872)
atgtctgattttaaagataattccgctgattttaatgataaagtcagtgataaagaggttgagtatatgtcacctcgtgaagtctctgtgactccggagacctctgctacaccaaatactccagccccatcccaatttagaagatttgttgactcattcaagagagctgaacaacaaaataactctgaaatcacctctgccgcttcttgtgatggtagttctgaaaacttggacaaagatggtaaagaagttgccgatcttgaagtacaagaaaatcaagttctcactgaaaagagtaatcaaaagaacaaagaattgaaacaaacaatcaaacctagacatgtcattcttatctctttgggtacaggtattggtacaggtttattggttggtaacgctaaggccctgcacaatgctggtcctgctggtcttctaattggttactctattatgggtacttgtctgtactgtattattcaagctgctggtgaattggctgtctcatacagttctctaagtggtggttttaatgtttatccttcattcttggttgaccctgcatttggtttctctgttgcttgggtatactgtatccaatggttatgtgtctgtcctttagaactggttaccgcctcgatgactattaagtattggactaccactgttaatgctgatatttttgttggtattttctacgtcttgatcattgtcattaatacttttggtgctcgtggttacgctgaagctgaattcttcttcaattgctgcaaaattctaatgatgattggcttctttatcctgggtattgtaatcaacactggtggtgctggtaatgatggctacattggtgacaggtactggcatacaccaggtgcctttgctggtgaccgtccaattgatcatttcaagggtatcatggctaccatggttactgccgcctttgcttttggtgccactgaattcatcgccttgactgctgccgagcaatcaaatccaagaaaggctattccatctgctgccaaaaaggttctttatagaattttgttcattttcttaggttcaatcactttggtcggtttcttggttccatatgactctgatcagttaatgggttctgggggttctgccacaaaggcctctccatatgttctggctgtttctacacatggtgtaaaagtcgttccacatttcattaatgctgtgatcctattgtcagttctatcggttggtaactctgctttctattccagttctcgtcttttgtactccttggcacaacaaggtaatgctccaaagttctttgactatgttgacagggaaggtagaccattcagagctatggtttgtgctggtgtatttgcaattatttccttctgtgctgcttctccaaaggaagaacaagttttcacctggttgttagctatttcaggtttatctcaagtatttacttggttcgccatttgcctatcccatattagattcagaaaggccatgtttgtacaaaagaggtctttgggagagattggtttcaaggctcagactggtgtttggggttcttactatgtctgtttcatgctggtcatgattttgattgctcagttctgggttgccattgcaccaattggtgaaggtaagttagacgcccaaggtttctttgagaattacttagctatgccaattttgattttattctacgttggttacaaaatttggaagaaggactggagcttgttcattagagcgaacaatattgacttggataagcacagacaaatttttgatgaagaattgttaaagcaagaagacgaagagtatagagagaagctaaagaatggtggctacctcaagagaatagctgccttctggtgttga

SEQ ID NO: 7219 - protein, 623 aa, Candida glabrata CBS 138
MSDFKDNSADFNDKVSDKEVEYMSPREVSVTPETSATPNTPAPSQFRRFVDSFKRAEQQNNSEITSAASCDGSSENLDKDGKEVADLEVQENQVLTEKSNQKNKELKQTIKPRHVILISLGTGIGTGLLVGNAKALHNAGPAGLLIGYSIMGTCLYCIIQAAGELAVSYSSLSGGFNVYPSFLVDPAFGFSVAWVYCIQWLCVCPLELVTASMTIKYWTTTVNADIFVGIFYVLIIVINTFGARGYAEAEFFFNCCKILMMIGFFILGIVINTGGAGNDGYIGDRYWHTPGAFAGDRPIDHFKGIMATMVTAAFAFGATEFIALTAAEQSNPRKAIPSAAKKVLYRILFIFLGSITLVGFLVPYDSDQLMGSGGSATKASPYVLAVSTHGVKVVPHFINAVILLSVLSVGNSAFYSSSRLLYSLAQQGNAPKFFDYVDREGRPFRAMVCAGVFAIISFCAASPKEEQVFTWLLAISGLSQVFTWFAICLSHIRFRKAMFVQKRSLGEIGFKAQTGVWGSYYVCFMLVMILIAQFWVAIAPIGEGKLDAQGFFENYLAMPILILFYVGYKIWKKDWSLFIRANNIDLDKHRQIFDEELLKQEDEEYREKLKNGGYLKRIAAFWC

SEQ ID NO: 7220 - DNA, 1839 bp, Candida glabrata CBS 138
  CDS (1)..(1839)
atgaactctaacgatctattgtccgaggttaaagtgtcttcttcggaagactctcaaatcctctccaagagtaacgactatgtacacgaacagaaccatatcatagaaggtgactacgatgatgacgataagtcgtcgtcatcgcataacctgaggtctaggttcgatgttcaagtcaagaacagacacttacagggattcatcgattctttcaagagggccgacgactctccagaccacaatgacctcgagaagaccaccaccgcacaccaggagcagaagaagaccatgaagtccaggcacgtcatcatgatgtccctgggtaccggtatcggtacgggtctgttggtctccaacggtaaaggtctgtccctggctggtcccgcctctttggtcatcgcatatggtctcgtctccttcgtcacttacttcatgatccaggcagccggtgagatggctgttacttacccaactctgcccggttccttcaacgcttacacttccttcttcatctcaaagcccttcggtttcgctacaacttggctgttctgcatccagtggctcaccgtgctgcctttggaattgatcacagcagctatgaccatcaagtactggaacacctccatcgacccagacgtcttcgtcattatcttctacgtgttcctgatgttcatccacttcttcggtgtgcaggcctatggtgaaacagaattcatcttcaacgcttgcaaaatcctcatgatcggtggcttcatcatcttcgctatcgtcgtcaactgcggtggtgccggtaaggacggctacatcggtggcaagtactggcacgacccaggtgccttcgcatcctcaaacggcgcatccagattcaaaggtatctgctacaacttggtcaacgcatacttctcctacggtggtaacgaactgttcgtcttgtccgtgaatgaccagaagaacccaagaaagtccaccccagcagcagccaagagtaacgtctaccgtatcgtggtcatctacttactaacaatgatcttgatcggtttcgttgtcccacacaacagctctgaactgctaggtgccagcggcggtaacggcttgcacgcatccccatacgtcttggcagcctccattcacggtatcaaagtcgtcccacatatcatcaacgcagtcatcttgatcgcattgatctcagtggccaactcctccttatacgccggccctagattactgagctccttggctcaacagggctacgccccaaggttcttgagttacgtcgacagaagaggcagacctttgaccgctttgctactttccgctttggtcggtgtcatcggtttcgcagctacctccccaagagaagaagaagtctttacgtggctcgctgccatctcaggtttaagtgaactgttcacatggacctccattatgttctcacacattagattcagaagagcaatgaagttgcaaaacaaatcgctagacacattgggatacaaagctaacactggcctgtggggttcttacttcggtgtaggtttcaatatccttgtgtttgctgctcaattctgggtcgccctatctccaccaaactccggtggtaaatgtgatgccaactccttcttcgcaagttacctagccatgccaatttggttggtgttctatttcggctacatgtgctggtacaaggacttcactgtcttgactgatttgaatcaagtggacttggataaccacagaaaagtttatgacccagaattcttgagacaggaagacctggaaaacaaagaaagattgagaaactcatcgttcttggtgaaaatctatgagttctggtgttaa

SEQ ID NO: 7221 - protein, 612 aa, Candida glabrata CBS 138
MNSNDLLSEVKVSSSEDSQILSKSNDYVHEQNHIIEGDYDDDDKSSSSHNLRSRFDVQVKNRHLQGFIDSFKRADDSPDHNDLEKTTTAHQEQKKTMKSRHVIMMSLGTGIGTGLLVSNGKGLSLAGPASLVIAYGLVSFVTYFMIQAAGEMAVTYPTLPGSFNAYTSFFISKPFGFATTWLFCIQWLTVLPLELITAAMTIKYWNTSIDPDVFVIIFYVFLMFIHFFGVQAYGETEFIFNACKILMIGGFIIFAIVVNCGGAGKDGYIGGKYWHDPGAFASSNGASRFKGICYNLVNAYFSYGGNELFVLSVNDQKNPRKSTPAAAKSNVYRIVVIYLLTMILIGFVVPHNSSELLGASGGNGLHASPYVLAASIHGIKVVPHIINAVILIALISVANSSLYAGPRLLSSLAQQGYAPRFLSYVDRRGRPLTALLLSALVGVIGFAATSPREEEVFTWLAAISGLSELFTWTSIMFSHIRFRRAMKLQNKSLDTLGYKANTGLWGSYFGVGFNILVFAAQFWVALSPPNSGGKCDANSFFASYLAMPIWLVFYFGYMCWYKDFTVLTDLNQVDLDNHRKVYDPEFLRQEDLENKERLRNSSFLVKIYEFWC

SEQ ID NO: 7222 - DNA, 1983 bp, Candida glabrata CBS 138
  CDS (1)..(1983)
atggtgtttggtggtagacgtcggaatgagaggtctcaatcaccggactcagaggaagccgatgtgagtaactatgagttgcacaacattgatgacagcaagaaaggatatgataacttaggtagtggtagcagaggtgctactacttctgccgttgaatattttgacaaagaaaatgttgatggcgtaaatatcgatgagaaattgcaatccactaccgaatttggcggtgatgagatgcctcgcggtaatatccgtcggttcatcgactctttcaaacgtgccgaacaacaacctaatcaacaacataatttggctgaggatttagaaaatgacttgaccactgcaatttccatgaactctttggatcgcgttcaaaataagccaaccggtaatggtcagatgaaattcgaggaagaagctttgaagaaatctattaagcctagacacgtcgtcatgatttccctaggtacaggtatcggtactggtctactggttggtaacgctaaagccctacataacgctggtccagctggtttagtcatcggttacgctattatgggttcttgtatctactgtattattcaagcagccggtgaaatggctgtcgtttactctaatttgctgggtggtttcaatacttacccatccatgttggttgaccctggttttggtttcgctgtcgcatgggtgtattgtctgcaatggttgtgtgtttgtcccttggaattggttactacttcgttgactatcaaatactggactacaacggtaaatccagacgcctttgtggtgatattttacgtggttattattttcattcaaatatttggtgccagaggttacgctgaagccgagttctttttcaactgttgtaagattcttatgattatcggtttctatatcttgggtattatcattaacgccggtggtgccggtaacgacggatacttgggtgctaagtactggcatgatccaggtgccttcagaggtacaaacggtattcaacgtttcaagggtattatggcgacttttgttagtgctgcttttgcttttggtgcaactgaatttattgcattgactgcagctgaacaatccaacccaagaaaggctatcccatctgcagctaagaaggtcctttaccgtgttatttgtatctttgttggtactatcgctttgctaggtttcttggtcccatgggattctgatcaattaatgggtgctggtggtagtgccactaaggcttctccttatgtcttagccatttctattcatggtgttagagttgttccacatttcattaacgctgttatcttaatctctgttttctctgtcgcaaattctgccttttactcaagttctcgtctattattgggtctagctcagcaaggctatgctccaaagtttttcgattacgttgacaggcaaggtagacctttcagagccatgtgttgtgctgctctttttggtgtcattgctttctgtgccgcatcaccaaaggaagaccaagtctttacttggttgctagccatttctggtttgtctcaattgtttacttggattgccatctgtgtttctcatattagatttagaagagctatgactgtccaaggtagatcattgggtgagattggtttcaaggcacaacttggtgtctatggttcatactacgccaccattatgatggtgctggctttgattgctcaattctgggttgccattgctccaattggtaacaacggtgacctggacgcagaaggtttctttgaaaactatttggctatgccaattttgattgcgttctactttggttacaaactttggaagagggactggcgtctgtttattagagcaaaggatattgatctagactcttacagacaggtatttgacgaagaactattgaaacaagaagatgaagaatacaaagagaaattaaagaatggccctatgtggaagagagtggtcgatttctggtgttag

SEQ ID NO: 7223 - protein, 660 aa, Candida glabrata CBS 138
MVFGGRRRNERSQSPDSEEADVSNYELHNIDDSKKGYDNLGSGSRGATTSAVEYFDKENVDGVNIDEKLQSTTEFGGDEMPRGNIRRFIDSFKRAEQQPNQQHNLAEDLENDLTTAISMNSLDRVQNKPTGNGQMKFEEEALKKSIKPRHVVMISLGTGIGTGLLVGNAKALHNAGPAGLVIGYAIMGSCIYCIIQAAGEMAVVYSNLLGGFNTYPSMLVDPGFGFAVAWVYCLQWLCVCPLELVTTSLTIKYWTTTVNPDAFVVIFYVVIIFIQIFGARGYAEAEFFFNCCKILMIIGFYILGIIINAGGAGNDGYLGAKYWHDPGAFRGTNGIQRFKGIMATFVSAAFAFGATEFIALTAAEQSNPRKAIPSAAKKVLYRVICIFVGTIALLGFLVPWDSDQLMGAGGSATKASPYVLAISIHGVRVVPHFINAVILISVFSVANSAFYSSSRLLLGLAQQGYAPKFFDYVDRQGRPFRAMCCAALFGVIAFCAASPKEDQVFTWLLAISGLSQLFTWIAICVSHIRFRRAMTVQGRSLGEIGFKAQLGVYGSYYATIMMVLALIAQFWVAIAPIGNNGDLDAEGFFENYLAMPILIAFYFGYKLWKRDWRLFIRAKDIDLDSYRQVFDEELLKQEDEEYKEKLKNGPMWKRVVDFWC

SEQ ID NO: 7224 - DNA, 1905 bp, Candida glabrata CBS 138
  CDS (1)..(1905)
atgttttccaaggtgaagaattatgggtcttcatctaagaaggaatccacagcggaggagttcaccataccggagtactccagggatgacggcgagaagtacgctggaaatagtaatgactacagccagcgcgacagcgataatacatctatagagtcagaaccaagaactaagcttgtacataggtttgtcgactctttcaagagagcacaggatgtgcccacaggccgtaagagcaaagaaatcggcaacaatggcggatccaagactaaaggtggctttgaagaggattctcttgacctagaaggttctgaccatgactccataataactaacacacatttgaagaaagcgatgaagtccagacatgttatgatgatgtctttaggtacgggtatcggtactggtctgttggtcgctaacgctaagggtctgcacttcggtgggcccgctgcgttggtcatcggttatgttctagtttcctttgtcacatatttcatgattcaagcagcaggtgaaatggctgtcacatacccaactcttcctggtaatttcaatgcatacagttccatttttgtctcaaatgcgttcggttttgccacagtctggattttctgtatccaatggttaactgtcctaccgctagaattgattactgcctccttgactataaagtattggaacgacaaaataaacgctgatgttttcatcgtgattttctatgtcttcctgttgtgtatccatctattcggtggtgttatcgcctacggtgaaactgaattcctgttcaacctatgtaaaattctcatggtcattggttttattatcatgtccattgttattaacgcaggtggtgcaggtaacagggagtacatcggtggcaaattctggcacgatccaggtgcttttgccggtaaaactgcaggttcaaggttcaaaggtatttgttacgttttggtcagtggttacttctcttacggtggtactgaactgtttgccctatctgtcaatgaacaatcaaatccaagaagatctactccacaagcttctaagagtagtttataccgtattttgattatttacttattgacaatgattttgatcggcttcaatgtgccttatgacagtgacgaattgatgggttcaggtggctctgctactcacgcttctccatatgtcttggctgcatcattgaatggagttaaaattgctcctcattttatcaatgccgtcatcttgatctccgttatttctgttgccaattcatctctatacgctgcaccaagattgatgtgttctttggctcagcaaggttacgctcctaaatttttggattatgtggacagacaaggtagacctttgcttgcgttgatcgcttgtttgcttgttggtgtcattggtttcgttgccgcctctcctaaggaagaagaagtctttacttggttggctgccattgcaggtttaagtgaacttttcacctggtcatccatcatgttgtctcatgttagatttagaatggcaatgaagttacagaacagaagtttggaagaattaggatataaagccactactggtatctatggttccatatatggtgtttgcttcaacttgttagtcttcgcagcccagttttggaccgctctgttcccatttggtggcgatggtaaagctaatgctaactctttctttgctaactatctagctatgccaatctggctagtcttttacttcggttacatgctgtggacacgtgatttccaattattaaaaccacttgataaaatagatcttgactttcatagaagaatttatgatccagaactaatgagacaagaggatgaagaatctaaggaaagactaaggaatggctcttttatgatgagaatgtatcatttctggtgttaa

SEQ ID NO: 7225 - protein, 634 aa, Candida glabrata CBS 138
MFSKVKNYGSSSKKESTAEEFTIPEYSRDDGEKYAGNSNDYSQRDSDNTSIESEPRTKLVHRFVDSFKRAQDVPTGRKSKEIGNNGGSKTKGGFEEDSLDLEGSDHDSIITNTHLKKAMKSRHVMMMSLGTGIGTGLLVANAKGLHFGGPAALVIGYVLVSFVTYFMIQAAGEMAVTYPTLPGNFNAYSSIFVSNAFGFATVWIFCIQWLTVLPLELITASLTIKYWNDKINADVFIVIFYVFLLCIHLFGGVIAYGETEFLFNLCKILMVIGFIIMSIVINAGGAGNREYIGGKFWHDPGAFAGKTAGSRFKGICYVLVSGYFSYGGTELFALSVNEQSNPRRSTPQASKSSLYRILIIYLLTMILIGFNVPYDSDELMGSGGSATHASPYVLAASLNGVKIAPHFINAVILISVISVANSSLYAAPRLMCSLAQQGYAPKFLDYVDRQGRPLLALIACLLVGVIGFVAASPKEEEVFTWLAAIAGLSELFTWSSIMLSHVRFRMAMKLQNRSLEELGYKATTGIYGSIYGVCFNLLVFAAQFWTALFPFGGDGKANANSFFANYLAMPIWLVFYFGYMLWTRDFQLLKPLDKIDLDFHRRIYDPELMRQEDEESKERLRNGSFMMRMYHFWC

SEQ ID NO: 7226 - DNA, 1902 bp, Zygosaccharomyces rouxii
  CDS (1)..(1902)
atgaggcccgaggatactataacaccttatgagctacaggacgttaagggagaagctgtatccgcttctcgtagtccgccagataatgaggtcgaatattttgataaattaggtgacgctcgtcaatacacatcgaatcttgagggcgaaggtacgccaacggaaggtgtatcaagacataggattaagaatcctctatttcgtaattttatcgattctttcaaaaggggtgaaaccacagcacgtatagctgatttggagaatgatttgactactgcagtatcaccacaactatccaattaccacggtagtataccttcagatgaagtcgtgatcaaaaaggaggaattaaagcgtgacatcaaccagcgtcacatggtgtttatggcaattggttctggtgtcggtactggtttactggttggtaacgcatctacattgaactcagctggtcctgctggtctacttattggttatgctcttatgggtacttgtgtttactgtgtgatccaagctgcaggtgaactgggggttacttatgctaacctaattggtggtttcaatgcgtatcctgcaatcttagttgcaccatcctttgcattttcagtcggttggatctacactttacaatggttatgtatgacaccattagaattggttacagcttcgttaacgatcaaatattggacgacaaaggtagatccggatgtatttgtggttatcttttatctgttgatcttgctgattaactttttcggttctaaaggttatgcagaagctgatttcttctttaactgtatgaaattggcaatgatttcagggtttttcatattaggtattgtggttgcttgtggtggtgcaggtcacgacggttatttaggtggaaaatactggcataatccaggtgctttcagaggtgagaaggcaatcgatcatttcaaaggtgtttcttccgtctttgtcacttctgcttttgcctttggtggtagtgaatttgtcgctctatccgcatctgaacaggccaatccaagaaaatcaattccatctgcagctaagttgattctttacagaattatttgggtctacttaacatccattaccatcttaggatttttggttccttgggatagtccacaattgcaaccttctagtgatggtaaaaaaacttcaccatatgttgttgccattgccatgcacggtgttaaagttgttcctcatttgattaatgccgttattctaatggctgttttgtctgtctccaattctgctttcttctacagttctcgtctacttctttctttgtctcaacgtggttatgctcccaagtggtttgattacgtcgacagaaagggtagacctgtaagggctatgttaatatctgctctattcggtgttatctgtttctgtgctacttctaagaaggaaactgatgttttcagttggttactggctatttctggtttgtctaccatttttacctatttctccatttgtgtgtcacacattagaatgagatctgccatgaaagtacaaggaagatccttgggtgagcttggattcagatctcaagtcggtacctacggttccttttacgcatgcctcttgttggtattgtcattgatggcagaattttgggttgcacttgcccccattggtgagggcaaattagatgcagagagtttcttcgagaattacttggcagcacctattggaattgtattctacttcggttatatgatttggaaaaaagactttaggattttcattagatcaaaggatatagatttggatttcaagagacaagtgtttgatgaggatttgattaaacaagaagatgaagagtacgcagaacaaatgagaaacgctccacgctggcgcaaagttatagctttcttgttttag

SEQ ID NO: 7227 - protein, 633 aa, Zygosaccharomyces rouxii
MRPEDTITPYELQDVKGEAVSASRSPPDNEVEYFDKLGDARQYTSNLEGEGTPTEGVSRHRIKNPLFRNFIDSFKRGETTARIADLENDLTTAVSPQLSNYHGSIPSDEVVIKKEELKRDINQRHMVFMAIGSGVGTGLLVGNASTLNSAGPAGLLIGYALMGTCVYCVIQAAGELGVTYANLIGGFNAYPAILVAPSFAFSVGWIYTLQWLCMTPLELVTASLTIKYWTTKVDPDVFVVIFYLLILLINFFGSKGYAEADFFFNCMKLAMISGFFILGIVVACGGAGHDGYLGGKYWHNPGAFRGEKAIDHFKGVSSVFVTSAFAFGGSEFVALSASEQANPRKSIPSAAKLILYRIIWVYLTSITILGFLVPWDSPQLQPSSDGKKTSPYVVAIAMHGVKVVPHLINAVILMAVLSVSNSAFFYSSRLLLSLSQRGYAPKWFDYVDRKGRPVRAMLISALFGVICFCATSKKETDVFSWLLAISGLSTIFTYFSICVSHIRMRSAMKVQGRSLGELGFRSQVGTYGSFYACLLLVLSLMAEFWVALAPIGEGKLDAESFFENYLAAPIGIVFYFGYMIWKKDFRIFIRSKDIDLDFKRQVFDEDLIKQEDEEYAEQMRNAPRWRKVIAFLF

SEQ ID NO: 7228 - DNA, 1830 bp, Saccharomyces uvarum
  CDS (1)..(1830)
atgccattatcagaagactttggatcttctggtaagaaagaggcttcgccagattccatttcaatacgctcctttagtgctgtgaacaaccttcagtcatcgtcaagtgaaaaaaattattctggacaaacaacccggaacaacaaacttatacataggttcgtggactcattcaaaagagcagaaggtagcactacacataccaagcaaataaatgagaatacatcagatttagaaggtgatgttaattccttcacgtcggactccaagctgaaaaagtccatgaaatcccgtcacgtcgtcatgatgactctggggacaggtatcggtacgggtcttttggttgccaatgctaagggtcttcattacggtgggcccgccgcattggttatcggttatttcttggtttcgtttgtcacatatttcatgattcaagcagctggtgaaatggccgtcacttatccgactttaccagcaaattttaacgcatactcctccatattcatctccaagccgtttgggtttgccacagtatgggtttactgtttccaatggctaactgttttacccctagagttgatcaccgctgccatgactattaaattttggaatgatacgataaatcccgatattttcattcttatcttctttgttttcttacttttcattcatttctttggtgtgaaaggttatggtgaaacagagtttatcttcaactgctgtaaaattttaatgatagcgggcttcatcattctttccgttgtcattaactgtggtggtgccggaaacgatggttacattggtggcaaatattggcgcaacccaggtgcatttgctggtgacacttcggcgggcaggttcaaaaacgtttgctatattttagttaccgcttacttttcttttggtggtatggaattatttgctttaagtgttcaagaacaggcgaatccaagaaagacaacccctgtggctgctaagagaagtatatatcgtatcctcgttatctacctactaactatgattttaattggattcaacgttccatataatgacgatcaattgatgggtgctggtgggtccgccacacatgcatctccttatgtgctagcggcctccatccatggcgtcaaagtggttccacatatcatcaatgctgttattttgatatctgttatctccgtcgcgaactcctccctatatgcgggcccaagattgatgtgctctttggcccagcaaggttacggacccaaattcttggattacgtcgacagagagggtagaccattaatagctctaattgtgtgtagtgttttcggtgtcatagggtttgttgcagcctcgtccaaggaagaggtcgtgtttgcatggctagctgccatcgcaggtttgagtgaactattcacctggacttccattatgttatcccatttacgttttagacaagcaatgaaagtacaaggaagatctctggatgagttaggatataaagctacaaccggtatttggggttccgcatacggggtcttcttcaatatcttggtgttcattgcccaattctgggtggccttggctcccctgaataatggtggtaaatgcagtgcggagtccttttttcaaagctatctggcttttccaatctggatagctttctacctcgggtatatgatctacaaccgcgacttcacctttttgaatcccctcgataagatcgatctagacttccacagacatatttacgatccagaactgatgagacaagaagacttggaaaatgaagaaaggaaaagagacatgtcgctgatgagaaagacttaccttttctggtgttga

SEQ ID NO: 7229 - protein, 609 aa, Saccharomyces uvarum
MPLSEDFGSSGKKEASPDSISIRSFSAVNNLQSSSSEKNYSGQTTRNNKLIHRFVDSFKRAEGSTTHTKQINENTSDLEGDVNSFTSDSKLKKSMKSRHVVMMTLGTGIGTGLLVANAKGLHYGGPAALVIGYFLVSFVTYFMIQAAGEMAVTYPTLPANFNAYSSIFISKPFGFATVWVYCFQWLTVLPLELITAAMTIKFWNDTINPDIFILIFFVFLLFIHFFGVKGYGETEFIFNCCKILMIAGFIILSVVINCGGAGNDGYIGGKYWRNPGAFAGDTSAGRFKNVCYILVTAYFSFGGMELFALSVQEQANPRKTTPVAAKRSIYRILVIYLLTMILIGFNVPYNDDQLMGAGGSATHASPYVLAASIHGVKVVPHIINAVILISVISVANSSLYAGPRLMCSLAQQGYGPKFLDYVDREGRPLIALIVCSVFGVIGFVAASSKEEVVFAWLAAIAGLSELFTWTSIMLSHLRFRQAMKVQGRSLDELGYKATTGIWGSAYGVFFNILVFIAQFWVALAPLNNGGKCSAESFFQSYLAFPIWIAFYLGYMIYNRDFTFLNPLDKIDLDFHRHIYDPELMRQEDLENEERKRDMSLMRKTYLFWC

SEQ ID NO: 7230 - DNA, 1746 bp, Penicillium chrysogenum
  CDS (1)..(1746)
atggaggagaagaagtttgaggccgtccaaactggcgcggaggcccccccagcttatggcgactcatctccaacgcggggaggcataggccaacgaatctttgacagtttcaagagagaccccaatcatacagtcaccggtcatgttggagctgatggctctggattcgacgctgagactgccgcccataacactgctcactccccgttgcagcgtcgcttgaagggtcgtcatctgcagatgattgctatcggtggttctatcggtactggtcttttcgttggttccggatctgttttggccaccggtggtccagcctcagtattgattgcctatatcttgatcggatgcatgctttattgtacagttcatgcattgggtgaaatggcagttctcttccccgttgccggttctttcgcccattattcaactcgtttcgtcgatcctgcttggggttttgccatgggctggaactacgctcttcagtggcttatcgtcttacccttggagatcgtcgctgcttctatcacggtcgattattggaacccaggggtttcaaatgccgcctgggtaactattttctgggttatgattgtctcaatcaacttattcggtgtgcgaggatatggtgaagctgaatttgtcttctccctcattaaggtcattgccgttattggtttcattatacttggaatcatcctcaactgcggtggtggaccccaaggtggatacatcggcgccaggtactggtacgacccaggtgcatttaggaacggtttcaagggtctctgcagtgtctttgtcaatgccgcatttgcctttgctggaaccgaacttgttggtcttgctgccgccgaaaccaccaatcctcgcaagtcccttccgacagccgttaagcaagtcttctggcgtattgctctcttctacatagtttcccttacccttgtcggcctcctagtgagatatgacgacgagagacttatcagcggtagctcttccgccgatgccaaggcctctcccttcgtcattgctattgagaacgcaggaattaaggctttgccttcgatcatgaatgtcgtgattatgattgcggtcctgtctgtcggcaattcctccgtctatggatcctcacgtactcttgctgcccttgccgagcagggccaagcccccaagttcctagcatacattgaccgcaagggacgtcctctacccgccattatcattgcatctatattgggtctgctttcctacctcgccgcctctgacgtgcagactaccgccttcgaatggatgatggccatctcgggtctgtcatctattttcaccggggttccgtgtgtccgtgcccacatcctcttccgtcgcgcatggaaaaaacagggccacagcctggacgaactggctttccgttcccaacccggcgtcattggctcgtgggtcggtttcattttcaactgtctcgtgctggttgcccagttctgggttgggttcgcccccattggttacgcagacatgacctctcaggagattgcctacaaattcttctctgtctacttggccgcccccgtggttctgatttgctacatcggttataagatcatgtacaagaccaagtttgttcgcacgtccgaggtggatttggtcaccggtcgtcgcgaccttgatatccagcatttaattgagcaggagatggccgagcaaagagaatggcccaagtggaagaaggtttataagttcttctgttaa

SEQ ID NO: 7231 - protein, 581 aa, Penicillium chrysogenum
MEEKKFEAVQTGAEAPPAYGDSSPTRGGIGQRIFDSFKRDPNHTVTGHVGADGSGFDAETAAHNTAHSPLQRRLKGRHLQMIAIGGSIGTGLFVGSGSVLATGGPASVLIAYILIGCMLYCTVHALGEMAVLFPVAGSFAHYSTRFVDPAWGFAMGWNYALQWLIVLPLEIVAASITVDYWNPGVSNAAWVTIFWVMIVSINLFGVRGYGEAEFVFSLIKVIAVIGFIILGIILNCGGGPQGGYIGARYWYDPGAFRNGFKGLCSVFVNAAFAFAGTELVGLAAAETTNPRKSLPTAVKQVFWRIALFYIVSLTLVGLLVRYDDERLISGSSSADAKASPFVIAIENAGIKALPSIMNVVIMIAVLSVGNSSVYGSSRTLAALAEQGQAPKFLAYIDRKGRPLPAIIIASILGLLSYLAASDVQTTAFEWMMAISGLSSIFTGVPCVRAHILFRRAWKKQGHSLDELAFRSQPGVIGSWVGFIFNCLVLVAQFWVGFAPIGYADMTSQEIAYKFFSVYLAAPVVLICYIGYKIMYKTKFVRTSEVDLVTGRRDLDIQHLIEQEMAEQREWPKWKKVYKFFC

SEQ ID NO: 7232 - DNA, 1830 bp, Saccharomyces pastorianus
  CDS (1)..(1830)
atgccattatcagaagactttggatcttctggtaagaaagaaacctcgccggattccatttcggtacgttcctttagtgctgggaacaaccttcagtcattgacaagtgaaaaaagttattccagagactcaaccgggaacgacaaacttatacatagatttgtggactcatttaagagggcagaaagtagcactacaaagaccaagcaaataaacaagaacacttcagatttagaagaggatgttcattcctttacgtcggactccgacttgaaaaagtccatgaaatcccgtcacgtcgtcatgatgtcgctggggacaggtatcggtacgggtcttttggttgctaatgctaagggtcttcattacggtgggccagccgcattggttatcggctatgttttagtttcctttgtcacatatttcatgattcaagctgctggtgagatggctgtcacttatccgactctaccagcaaatttcaatgcatactcctccatattcgtctccaagccgtttgggttcgccacagtatggctttactgtttccaatggctaaccgttttacccctagagttaatcaccgcatccatgacagttcaattttggaacgataaaatcaatgctgatattttcattctaatcttctttgttttcttacttttcgtccatttctttggtgtgaaagcatacggtgagacagagtttattttcaactgttgtaaaattttaatgatagcgggcttcatcattctttccgttgtcattaactgtggtggtgccggaaatgatggttacattggtggcaaatattggcgtaacccaggtgcatttgctggtgactcttcggcttccaggttcaaaaacatttgctatattttagttaccgcctatttttcgtttggtggtatggaattatttgcattaagtgttcaagaacaggagaatccaagaaagtcgacccctgtggcagctaagagaagcatataccgtatcctcattatctaccttttaactatgattttgattgggttcaatgttccgtataatgatgatcaattgatgggatctggcgggtccgctacacacgcatctccctatgtgttggcagcctccatccatggtgtcaaagttgttccacatattatcaatgctgttattttaatttctgtcatttcagtgtccaactcctccctatatgcgggcccaagattaatgtgctctttggcccagcaaggctacgcacccaaattcttagattacatcgacagagagggtagaccattaagagctttaattgtgtgtagtatttttggcaccgttgcgtttgtcgcagcctcgtccaaggaagaggtcgtgtttacatggctagcagccatcgcaggtttgagtgaactattcacctggacttccatcatgttatctcactttcgttttagacaagcaatgaaagtacaaggaagatctttagatgagttaggatataaagctacatccggtatttggggttccgcatacggagtcttcttcaatatcttggtgttcattgctcaattctgggtggccttggcccccttgggtaatggtggtaaatgtagtgtggagtcctttttcgagagctatctggctgctccaatttggctagctttctacctcgggtatatgatctacaaccgcgatttcacctttttgaaccccctcgacaagatcgatctagacttccacagacgtgtttacgatccagagctgatgagacaagaagatttggaaaataaagaaaaaaaaaaacacatgccgctaatgaaaaaggcttaccttttctggtgttga

SEQ ID NO: 7233 - protein, 609 aa, Saccharomyces pastorianus
MPLSEDFGSSGKKETSPDSISVRSFSAGNNLQSLTSEKSYSRDSTGNDKLIHRFVDSFKRAESSTTKTKQINKNTSDLEEDVHSFTSDSDLKKSMKSRHVVMMSLGTGIGTGLLVANAKGLHYGGPAALVIGYVLVSFVTYFMIQAAGEMAVTYPTLPANFNAYSSIFVSKPFGFATVWLYCFQWLTVLPLELITASMTVQFWNDKINADIFILIFFVFLLFVHFFGVKAYGETEFIFNCCKILMIAGFIILSVVINCGGAGNDGYIGGKYWRNPGAFAGDSSASRFKNICYILVTAYFSFGGMELFALSVQEQENPRKSTPVAAKRSIYRILIIYLLTMILIGFNVPYNDDQLMGSGGSATHASPYVLAASIHGVKVVPHIINAVILISVISVSNSSLYAGPRLMCSLAQQGYAPKFLDYIDREGRPLRALIVCSIFGTVAFVAASSKEEVVFTWLAAIAGLSELFTWTSIMLSHFRFRQAMKVQGRSLDELGYKATSGIWGSAYGVFFNILVFIAQFWVALAPLGNGGKCSVESFFESYLAAPIWLAFYLGYMIYNRDFTFLNPLDKIDLDFHRRVYDPELMRQEDLENKEKKKHMPLMKKAYLFWC

SEQ ID NO: 7234 - DNA, 1806 bp, Saccharomyces kluyveri
  CDS (1)..(1806)
atgtcaaaaaaatccctagagaacttaagcaacgaaaagttgccggccacagaatgtggttcttctaactcaaatcttcgagaaagcatttcttctaacgacctcagtgacggagatcgtggtttcgtgaaccgcaagcttcacaacttttgtaattcctttaagagagctaatagtgacacttttgacgcatcacaagatctggaaggcgcatccataaattcggtacgatcaaactcaaaatttaaacagagcatgaagtccaggcacgtcgtcatgatgtctctaggtaccggtattggtaccggtttgttggtcgccaacggtaaatctttgcattttggtgggcctgctggtctattgattgggtactcgttggtgtctgttgttgcctatattatgatgcaagcagctggtgaaatggccgtcgcttatccaacccttcccgggaacttcaatgtgtactcttcaatctttatctccaaatcattcgggtttgctaccgtatggctttattgcttacagtggttgactgttctaccattggagttgattaccgcatcgttaacgataaaatactggaatagttcaatcaaccctgacgcctttatcgccattttttacgcagttatcgttttcattcatttcttcggtgcagccggttacggtgaagccgaatttatctttagtacttgcaaagtgtcgatgattgccggatttattatcctgagtattgtgattaactgtggtggtgcgggtactggcggctacattggcggtgaatattggcgcaaccctggtgcctttgctggtggctctccaattggtcatttcaaaggtattgcctacgttctggtgaccgcctacttttcgtacggtggtatggaattgttcgctctaacagtcaatgaacaggccaaccctagaaaagccgtgccatcagctaccaagaagtgtatctaccgtattctgataatttacatgttgacaatgatcttaattgggtttttggtgccatacaacagtgacgaattgatgggttcttctggtaaatctgcgacacacgcgtcgccttatgtcattgccgttgcatcacacggtgtcaaagttgttccacacatcatcaatgctgttattttaatctctgtcgtttctgtcggtaattctgccatgtattctgctcctagactgctcaattctttagccgagcagggctacgctccaaaaattttcagctatgtggatagagcaggtagaccattggttgcattggttggctgttccattttcggccttttgtcctttgttgctgcttccgataaggaagaacaagtcttcacttggttggctgccattgcaggtttaagcgaacttttcacctggtctgctatctgtctatctcacgtcagattcagagatgctatgaagtatcaagggtactccttgagtgaattggggtacaagtctaagactggctactgggggtccatatacgcaatcttcttcaacataattgtcttcgttgctcaattctgggttgccttggcacccattggtaatggtgggaaggcagacgctgaagcctttttccagagttacctggccttccctatctggatatcctgttatgttggttacaaaatctacagtaaagagtggaaactgcttgttccccttgatgaaattgatctaaacagccatagacacatttttgataaacacattttgcagcaagaagacgatgaacataaggaaaaattgaaaaactccggatggtgggtcaaaatggctaatttttggtgctaa

SEQ ID NO: 7235 - protein, 601 aa, Saccharomyces kluyveri
MSKKSLENLSNEKLPATECGSSNSNLRESISSNDLSDGDRGFVNRKLHNFCNSFKRANSDTFDASQDLEGASINSVRSNSKFKQSMKSRHVVMMSLGTGIGTGLLVANGKSLHFGGPAGLLIGYSLVSVVAYIMMQAAGEMAVAYPTLPGNFNVYSSIFISKSFGFATVWLYCLQWLTVLPLELITASLTIKYWNSSINPDAFIAIFYAVIVFIHFFGAAGYGEAEFIFSTCKVSMIAGFIILSIVINCGGAGTGGYIGGEYWRNPGAFAGGSPIGHFKGIAYVLVTAYFSYGGMELFALTVNEQANPRKAVPSATKKCIYRILIIYMLTMILIGFLVPYNSDELMGSSGKSATHASPYVIAVASHGVKVVPHIINAVILISVVSVGNSAMYSAPRLLNSLAEQGYAPKIFSYVDRAGRPLVALVGCSIFGLLSFVAASDKEEQVFTWLAAIAGLSELFTWSAICLSHVRFRDAMKYQGYSLSELGYKSKTGYWGSIYAIFFNIIVFVAQFWVALAPIGNGGKADAEAFFQSYLAFPIWISCYVGYKIYSKEWKLLVPLDEIDLNSHRHIFDKHILQQEDDEHKEKLKNSGWWVKMANFWC

SEQ ID NO: 7236 - DNA, 1752 bp, Saccharomyces kluyveri
  CDS (1)..(1752)
atgagctcggatatgtccaccgcaaattccaaaaaagaagaggagtctacgtatgcgattattcaaacatcctcaccttgctctaaaaagtattcctatatttccggacaggttaacaggtttattaattcttttagaagaaaaggtgagagtgaagatgttaaggaattgaaaggagagaatgaggaatgtggggctgccaccaaaatgaaaaaaagcatcaaatctcgtcatttattgatgatatcactaggtaccggtattggcacaggtttgcttgttggaaatggtaaggcactggccaaagctggacctgcaggtttagttatagggtatgcagttgcctcgattatgctatactgtattatccaggccgctggtgagttgggtatttgttattctgggatggctggtaactacacggcgtattcgtcactgttggtagaccccgctttaggtttttcagtttcctgggtctactgtgtgcaatggatgacagttttacctctacaattggttaccgctgcaatgactgttagatactggacaaatgccaacccggacatatttgtcgctgtatttttcgttgtaataatggtgattaatatgtttggtgctaaaggttatgctgaagcagagttcctgttcaacatatgcaaagtattgatgattgctgggtttgttatcttgggtattgctataaattgtggcggtgccggtaccagtggatatattggtgctaagtattggcattcgccaggttcatttgctgctggttttaaaggtgtttgttacgtgttctgttacgcagcttttagctacggtggtattgaagtcatggtattgacagctagtgagcaagaaaatccaaggaaatctatcccaaatgcttgtaagaaagtcatttaccgtatactgatgatttacatgctgactacaatcattgtatgtttcctagttccatacaacagcagcgagttgatgggttcttccggcgagtctgcatcacatgcctccccacttgtcattgctgttgcatcgcatggtgttaagatcgtcccacatattataaatgccgtcatattaatctcggtcatttctgttggcaactcctcaatgtattctgctcctagactattactatctctgtctgagcaaggttacgctccaaaatttttaaattacgtggatagacaaggtagaccattgatttgttttgccattaccttgctagttgcgttaattgcatttgtcgccgcgtccgacgccgaagaggatatatttgcttggctattggcgatctcagggttatcccaaatcttcatctggacttccatatgcctttcccatgttagattcagagatgcgatgcacgcacaaggtctttctttgggacaaatcggttacaaatcacaaacaggttattggggttcgtggtttgccatagttataagtgttttggtgttaattgcccagttctgggttgcaattgcaccaattggtgaagaaggtagattaaatgcagaaacatttttccagaattacttggctttcccaattttgttgggtgcttactttggctataaagtttatcacaaagactggagattatgcattccagcaagtgaggtagatttgtcctcccacagaaatatatctgatgaagagatattgagacaagaagattacgaatggaatgagaagatgtccaattcttccatttgggttaggctgtgccatttttggtgctga

SEQ ID NO: 7237 - protein, 583 aa, Saccharomyces kluyveri
MSSDMSTANSKKEEESTYAIIQTSSPCSKKYSYISGQVNRFINSFRRKGESEDVKELKGENEECGAATKMKKSIKSRHLLMISLGTGIGTGLLVGNGKALAKAGPAGLVIGYAVASIMLYCIIQAAGELGICYSGMAGNYTAYSSLLVDPALGFSVSWVYCVQWMTVLPLQLVTAAMTVRYWTNANPDIFVAVFFVVIMVINMFGAKGYAEAEFLFNICKVLMIAGFVILGIAINCGGAGTSGYIGAKYWHSPGSFAAGFKGVCYVFCYAAFSYGGIEVMVLTASEQENPRKSIPNACKKVIYRILMIYMLTTIIVCFLVPYNSSELMGSSGESASHASPLVIAVASHGVKIVPHIINAVILISVISVGNSSMYSAPRLLLSLSEQGYAPKFLNYVDRQGRPLICFAITLLVALIAFVAASDAEEDIFAWLLAISGLSQIFIWTSICLSHVRFRDAMHAQGLSLGQIGYKSQTGYWGSWFAIVISVLVLIAQFWVAIAPIGEEGRLNAETFFQNYLAFPILLGAYFGYKVYHKDWRLCIPASEVDLSSHRNISDEEILRQEDYEWNEKMSNSSIWVRLCHFWC

SEQ ID NO: 7238 - DNA, 1788 bp, Saccharomyces castellii
  CDS (1)..(1788)
atggaaagttctaagaagaatgaaacttctccggaagtgaatagtataacctcttccactttgaagactccaaacgttacagagaaattcgaaccatatccagacactacagctgtcaagcacagaacacatttcaacagattcgttgactcattcaagagagctgaagtaaaccataatggtatagatcttgaagatggtaccaactcaatacaatccgatgataatttaaagaaggccatgaagtccagacacgtcattatgatgtctctagggacgggtatcggtaccgggttgttggtcgccaacgctaagggtctttatttggctggtcctgcatctttagtcattgggtactttatggtctccttcattacatatttcgtcattcaagccgcaggtgaaatggccgtcacatatccaactttaccaggtgggtttaataattacgcttccattttcgtttctaaaccattcggtttcgctaccgtgtggcttttctgtattcaatggttgaccgtcttacctttggaattgattaccgcatccatgactattaaatattggaatgataagattaatgcagatgtcttcgtcgtcatactctacgtgtttttattattcattcatttctttggtgtcagagcatacggtgaggctgaatttattttcaattcatgtaagattctcatgattggagggttcgtcatcctaagtatcgtcgttaattgtggtggagctggtgttgatggatacattggtggcaaatattggcgtgatccaggtgcatttgcatcagataacgcagcttccagatttaaaggtgtggcatttgtccttgtcactgcttatttctcatatggtggtgtcgaattattcgcattgtctgttaatgaacaagaaaatccaagaagatccacccctgctgctgccaagcaaagtatctaccgtatccttatcatttatttgttaaccatgatcttaatcggtttcaacgtcccacataacagtgatcaattgatgggtgctggtggatctgccactcatgcatccccctacgtgttggctgtctccatccacggtgttaaagtggttcctcatatcatcaacgcagtcatcttaatttcagtgacttctgtggctaattccgcattgtatgcatctccaagattactaagatcattagctgaacaagggtacgcacctaaatacttcaattatgtcgatagagaaggtagaccattacgtgcgctaatcttatgtagtatctttggtgtcattgcattctgtgcctgttccgatcaagaagaagtcatcttcacatggttagctgccattgcagggttaagtgaattatttacatggtcctccatccttctatcacatgttcgtttcagattggccatgaaagcccagggcaagtccttgaacgaattagggtatatatcaattactggtatttgggggtccctttacggttgtttcttcaacgttttggtgtttattgcccaattctgggtcgcgctaagtcctcctggtagtaaaggtgtctacagcgcggaagcttttttcgaaagttatttggcattccccgtttggttgttcttctatttaggatacatgctttacagtagagatttcacattcttgaccgatttgaaaaagattgatctagacaaccatagacgcctctacgatcctgaactattgagacaagaagatgaagaaaccaaggagagaataaggaatggtggctggacgcagaagctgttaaatttctggtgttag

SEQ ID NO: 7239 - protein, 595 aa, Saccharomyces castellii
MESSKKNETSPEVNSITSSTLKTPNVTEKFEPYPDTTAVKHRTHFNRFVDSFKRAEVNHNGIDLEDGTNSIQSDDNLKKAMKSRHVIMMSLGTGIGTGLLVANAKGLYLAGPASLVIGYFMVSFITYFVIQAAGEMAVTYPTLPGGFNNYASIFVSKPFGFATVWLFCIQWLTVLPLELITASMTIKYWNDKINADVFVVILYVFLLFIHFFGVRAYGEAEFIFNSCKILMIGGFVILSIVVNCGGAGVDGYIGGKYWRDPGAFASDNAASRFKGVAFVLVTAYFSYGGVELFALSVNEQENPRRSTPAAAKQSIYRILIIYLLTMILIGFNVPHNSDQLMGAGGSATHASPYVLAVSIHGVKVVPHIINAVILISVTSVANSALYASPRLLRSLAEQGYAPKYFNYVDREGRPLRALILCSIFGVIAFCACSDQEEVIFTWLAAIAGLSELFTWSSILLSHVRFRLAMKAQGKSLNELGYISITGIWGSLYGCFFNVLVFIAQFWVALSPPGSKGVYSAEAFFESYLAFPVWLFFYLGYMLYSRDFTFLTDLKKIDLDNHRRLYDPELLRQEDEETKERIRNGGWTQKLLNFWC

SEQ ID NO: 7240 - DNA, 1782 bp, Saccharomyces castellii
  CDS (1)..(1782)
atgccaagaaacgttatacaaccgaacaaggaaaagactgtggactattcgtcgacagaatatcttccaaacgagttagaatctccatcattcaacctcgatgcaactgaggaatctagatctggtctagttcacagattcgtcgactcattcaagagggctcaagattctacagaaaatgatctcgaagatgggacgaaaccattaggtgatgcttcacatttaaagaaggccatgaagtcaagacatgtcatcatgatgtgtgttggtaccggtatcggtacgggtcttctagtggctaatgcttcagggctatcctacggggggcccggttcattagttattggttatgtattggtttcctttgttacttatttcatgattcaagccgcaggtgaaatggccgtcgcataccctacattaccgggaaatttcaattcttatacatcaatgttcatttctaaaccattcggtttcgctacagtatggttatttttcatccaatggttaactgtgttcccattagaattgatcaccgcatcattaactatcaaatactggaatgataaaatcaatgctgatgtattcattgtcatcttctacgtgttcttattatttattcatttctttggtgtcaaagcttacggtgaagctgaatttatcttcaattcatgtaaagttctgatgattgctgggtttatcatattatcaatcgtaatcaactgtggtggtgcaggtaaagatggttatattggtgcaaaatattggagagatccaggttcttttgctgaaggtgattccgtggaaaaatttaaaggtatttgttacatcttagtcaccgcatatttctcctatggtggtgctgaattattctcattatctgtcaatgaacaagagaatccaagaaaatctacccctcaagctgccaaacaaagtatataccgtatcttaatcatttatttgttgacaatgattttaattgggtttaacgtccctcataataacgatcaactaatggggtcgggtggatccgcaacacatgcatccccatacgtcctggccgcatcaattcatggtgttaaagtggttcctcattttatcaatgctgtcattttgatctctgttatttctgtcgcaaattcagctctttatgcatctccaagattgatgtgttcccttgctgaacaaggttatgctccaaaattcttagattatgttgacagagaaggtagaccattacgtgctctaatactttgtgctgtttttggtgtcattgggtttgtctctgcatcatccaaggaggaagaagtcttcacttggttagctgccattgcagggttaagtgaacttttcacttggtcaggaattatgctttctcacgtccgttttagacaatgtatgaaactacatggtagatccgaggaagaaattggtttcagagctgttactggtatctgggggtcaatgtacgggatctcctttaacatgctggtgttcattgcccaattttgggtcgctcttgccccaccaagtcttcatggtaaagtagatgctgagtcattcttccaaagttacttagctgcaccaatttggctattcttttacttcggctacatgctttataagagagatttcacatttttagtcccactggataaaattgacctaaatttccacagaagaatctatgatcctgaactgataagacaggaagatgaagaaaataaggaaaaaatcaaaaattcctctgtgtgggttagaatgttccatttctggtgctaa

SEQ ID NO: 7241 - protein, 593 aa, Saccharomyces castellii
MPRNVIQPNKEKTVDYSSTEYLPNELESPSFNLDATEESRSGLVHRFVDSFKRAQDSTENDLEDGTKPLGDASHLKKAMKSRHVIMMCVGTGIGTGLLVANASGLSYGGPGSLVIGYVLVSFVTYFMIQAAGEMAVAYPTLPGNFNSYTSMFISKPFGFATVWLFFIQWLTVFPLELITASLTIKYWNDKINADVFIVIFYVFLLFIHFFGVKAYGEAEFIFNSCKVLMIAGFIILSIVINCGGAGKDGYIGAKYWRDPGSFAEGDSVEKFKGICYILVTAYFSYGGAELFSLSVNEQENPRKSTPQAAKQSIYRILIIYLLTMILIGFNVPHNNDQLMGSGGSATHASPYVLAASIHGVKVVPHFINAVILISVISVANSALYASPRLMCSLAEQGYAPKFLDYVDREGRPLRALILCAVFGVIGFVSASSKEEEVFTWLAAIAGLSELFTWSGIMLSHVRFRQCMKLHGRSEEEIGFRAVTGIWGSMYGISFNMLVFIAQFWVALAPPSLHGKVDAESFFQSYLAAPIWLFFYFGYMLYKRDFTFLVPLDKIDLNFHRRIYDPELIRQEDEENKEKIKNSSVWVRMFHFWC

SEQ ID NO: 7242 - DNA, 1857 bp, Saccharomyces bayanus
  CDS (1)..(1857)
atgaacgacagcgacagtctctttgtcgacgaggccaatccagctccatgtacacatggtctgcacgagagagggcacgcggaaaaggagaagaaggacttcacagtgactgaaaaccaagatgaaggactacaacagcaagcgaagcgccaagggacgagtgggaaattcaaactacaaaacgaatgcaaaaaattcttcgactcgttcaaaagacagctgccagcggatcaaaattccgaactagagtcacaagaaaggaacaatttgacaaggtccatcaaatcacgccatttgatcatgatcagtctcggcaccggtatcggtacggggctgctggtcgggaatggccaagttctcggaacggcaggacccgccgggttggtgcttggttatggtatcgcctctatcatgctttactgtatcatccaagccgccggtgaactgggtctttgttatgccgggttaaccggtaattacaccaggtactcttccattttggtcgacccttcattggggtttgccgtttccgtggtttataccatccaatggttgaccgttcttcctttgcagttggtcacggcagcgatgactatcaaatattggaccaatgtgaacgcagacatctttgttgccgcagttttcatttttgtcatcatcatcaacttgtttgggtccaaaggctatgccgaagctgaattcatgtttaatatctgtaaaattctgatggtaatcggattcgtgatcctggccattgtcatcaattgcggtggtgcaggtgataggaaattcatcggtactaaatactggcacaatcctggtccatttgctcacggtttcaaaggtgtctgtactgttttttgttatgccgccttcagttacggtggtatcgaagtcctgcttctatcagcagccgagcaagagaacccaacaaaatccattccaaacgcttgcaaaaaagttgtgtatcgtatcttgttcatttacatgttgacgaccattttgatttgcttcctggtaccatacaacagtgacgaattattaggctctggtagctcttccgggtcacatgcatctccatttgtcattgctgttgcgtcccacggtgtcaaagtcgtgcctcacttcatcaatgctgtgattttgatttctgttatttctgtggctaattcttcgttatattctgcaccaaggctactactatcgttggcagaacaagggtttttacctaaatgtctggcgtatgttgacagaaacggcagacctttgctttgttttcttgtttctattatctttgggtgcatcggctttgttgccacgagtgacgctgaagaacaggttttcacatggttattagccatttccagtctttcccaattgtttatttggatgtcgatgtctctgtcacatattagattcagagacgccatggccaagcaaggccgttcaatggacgaggtgggatacaaagcacaaacaggctactggggatcttggcttgcggttttgattgcgttatttttcctagtttgccagttttgggtcgccatcgcacccgttagcaaacatggtaaattggatgctaatgttttcttccagaattatttggcaatgcccattgtcttgtttgcctatttcggccacaagatctacaccaaatcgtggaagttttggattccagccgaaaaaatcgatttggactcacacagaaccatatacgtcccaccaatactcatggggactaacaagattgatgacgatgatcttaaagaatatgaaacttcagagtcatcggaaaacccgaacggctcaggctcaagaaagtttttcaagagaatggctaatttctggtgttaa

SEQ ID NO: 7243 - protein, 618 aa, Saccharomyces bayanus
MNDSDSLFVDEANPAPCTHGLHERGHAEKEKKDFTVTENQDEGLQQQAKRQGTSGKFKLQNECKKFFDSFKRQLPADQNSELESQERNNLTRSIKSRHLIMISLGTGIGTGLLVGNGQVLGTAGPAGLVLGYGIASIMLYCIIQAAGELGLCYAGLTGNYTRYSSILVDPSLGFAVSVVYTIQWLTVLPLQLVTAAMTIKYWTNVNADIFVAAVFIFVIIINLFGSKGYAEAEFMFNICKILMVIGFVILAIVINCGGAGDRKFIGTKYWHNPGPFAHGFKGVCTVFCYAAFSYGGIEVLLLSAAEQENPTKSIPNACKKVVYRILFIYMLTTILICFLVPYNSDELLGSGSSSGSHASPFVIAVASHGVKVVPHFINAVILISVISVANSSLYSAPRLLLSLAEQGFLPKCLAYVDRNGRPLLCFLVSIIFGCIGFVATSDAEEQVFTWLLAISSLSQLFIWMSMSLSHIRFRDAMAKQGRSMDEVGYKAQTGYWGSWLAVLIALFFLVCQFWVAIAPVSKHGKLDANVFFQNYLAMPIVLFAYFGHKIYTKSWKFWIPAEKIDLDSHRTIYVPPILMGTNKIDDDDLKEYETSESSENPNGSGSRKFFKRMANFWC

SEQ ID NO: 7244 - DNA, 1830 bp, Saccharomyces bayanus
  CDS (1)..(1830)
atgccattatcagaagactttggatcttctggtaagaaagaggcttcgccagattccatttcaatacgctcctttagtgctgtgaacaaccttcagtcatcgtcaagtgaaaaaaattattctggacaaacaacccggaacaacaaacttatacataggttcgtggactcattcaaaagagcagaaggtagcactacacataccaagcaaataaatgagaatacatcagatttagaaggtgatgttaattccttcacgtcggactccaagctgaaaaagtccatgaaatcccgtcacgtcgtcatgatgactctggggacaggtatcggtacgggtcttttggttgccaatgctaagggtcttcattacggtgggcccgccgcattggttatcggttatttcttggtttcgtttgtcacatatttcatgattcaagcagctggtgaaatggccgtcacttatccgactttaccagcaaattttaacgcatactcctccatattcatctccaagccgtttgggtttgccacagtatgggtttactgtttccaatggctaactgttttacccctagagttgatcaccgctgccatgactattaaattttggaatgatacgataaatcccgatattttcattcttatcttctttgttttcttacttttcattcatttctttggtgtgaaaggttatggtgaaacagagtttatcttcaactgctgtaaaattttaatgatagcgggcttcatcattctttccgttgtcattaactgtggtggtgccggaaacgatggttacattggtggcaaatattggcgcaacccaggtgcatttgctggtgacacttcggcgggcaggttcaaaaacgtttgctatattttagttaccgcttacttttcttttggtggtatggaattatttgctttaagtgttcaagaacaggcgaatccaagaaagacaacccctgtggctgctaagagaagtatatatcgtatcctcgttatctacctactaactatgattttaattggattcaacgttccatataatgacgatcaattgatgggtgctggtgggtccgccacacatgcatctccttatgtgctagcggcctccatccatggcgtcaaagtggttccacatatcatcaatgctgttattttgatatctgttatctccgtcgcgaactcctccctatatgcgggcccaagattgatgtgctctttggcccagcaaggttacggacccaaattcttggattacgtcgacagagagggtagaccattaatagctctaattgtgtgtagtgttttcggtgtcatagggtttgttgcagcctcgtccaaggaagaggtcgtgtttgcatggctagctgccatcgcaggtttgagtgaactattcacctggacttccattatgttatcccatttacgttttagacaagcaatgaaagtacaaggaagatctctggatgagttaggatataaagctacaaccggtatttggggttccgcatacggggtcttcttcaatatcttggtgttcattgcccaattctgggtggccttggctcccctgaataatggtggtaaatgcagtgcggagtccttttttcaaagctatctggcttttccaatctggatagctttctacctcgggtatatgatctacaaccgcgacttcacctttttgaatcccctcgataagatcgatctagacttccacagacatatttacgatccagaactgatgagacaagaagacttggaaaatgaagaaaggaaaagagacatgtcgctgatgagaaagacttaccatttctggtgttga

SEQ ID NO: 7245 - protein, 609 aa, Saccharomyces bayanus
MPLSEDFGSSGKKEASPDSISIRSFSAVNNLQSSSSEKNYSGQTTRNNKLIHRFVDSFKRAEGSTTHTKQINENTSDLEGDVNSFTSDSKLKKSMKSRHVVMMTLGTGIGTGLLVANAKGLHYGGPAALVIGYFLVSFVTYFMIQAAGEMAVTYPTLPANFNAYSSIFISKPFGFATVWVYCFQWLTVLPLELITAAMTIKFWNDTINPDIFILIFFVFLLFIHFFGVKGYGETEFIFNCCKILMIAGFIILSVVINCGGAGNDGYIGGKYWRNPGAFAGDTSAGRFKNVCYILVTAYFSFGGMELFALSVQEQANPRKTTPVAAKRSIYRILVIYLLTMILIGFNVPYNDDQLMGAGGSATHASPYVLAASIHGVKVVPHIINAVILISVISVANSSLYAGPRLMCSLAQQGYGPKFLDYVDREGRPLIALIVCSVFGVIGFVAASSKEEVVFAWLAAIAGLSELFTWTSIMLSHLRFRQAMKVQGRSLDELGYKATTGIWGSAYGVFFNILVFIAQFWVALAPLNNGGKCSAESFFQSYLAFPIWIAFYLGYMIYNRDFTFLNPLDKIDLDFHRHIYDPELMRQEDLENEERKRDMSLMRKTYHFWC

SEQ ID NO: 7246 - DNA, 1902 bp, Saccharomyces bayanus
  CDS (1)..(1902)
atgtcctcgtcgacgtcgccatacgaactgaaggacttgaaaaatagctccactgaagtacatgccgcggagcaggagaacgaaatcgagtatttcgaaacagactccaatgaccgtccctcgcagcagcctcatctggactacgagcaacacaacacctctgccgtgcgtcggttcctcgactccttcaagagggccgaccaggatcaagagcaggaggcagaagtggcacagatgaacgacctcacgtccgccatttcgccctcgtccagacaggctcacgagctggagaaggacgagactactgacaagatagctcctcacacgggccacaaatccgactcgctgaagaagaccatccagcccagacacgtgcttatgattgcgctcggtaccgggatcggtaccgggctactggtgggtaatggtacagcgctggtgcatgcgggccccgctgggctgctcatcggttacgccatcatgggttccattctgtactgcatcatccaggcctgtggtgagatggccctcgtgtacagcaacctgaccggtgggtacaatgcatacccgagtttcctggtggatgacgggttcgggtttgccgtcgcctgggtttactgtctgcaatggttatgtgtgtgtcccctggagctggtcacggcgtccatgaccatcaagtactggaccacgtccgtcaacccggacgtgttcgtcatcatcttctatgtcctggtcatcaccattaacattttcggcgctcgtggttacgcagaggcggaattcttcttcaactgctgcaaaatcctcatgatgaccgggttcttcattctcgggatcatcatcgatgtcggtggggccggaaacgacggctacattggtggcaagtactggcacgaacccggtgcgttcaacggtgtgcacgccattgacagattcaaaggtgtcgtcgccactttggtcaccgctgccttcgcgtttggtgggtccgaattcattgccatcaccactgccgaacagtccaacccaagaaaggccattccaggtgccgccaagcagatgatctacagaatcctgttcctgttcctggccaccatcatcattgtgggtttcctcgtgccatacaactccgaccaactgttgggttccagcggtggcggtaccaaggcctccccatacgttattgccatcgcatcccacggtgttcgtgtggccccacatttcgtcaacgccgttatcctactgtcggtcctatccatggccaactcctctttctactccagtgcccgtttgttcctaactttatccgagcaaggttacgcccccaagatcttttcctacattgacagagccggcagacctttgattgccatgtgcgtctccgcattgtttgccgtcattgccttctgtgctgcatcccccaaggaggaccaagtgttcacttggttgttggccatttccggtctatcccaacttttcacgtggaccgccatttgtctttctcatatcagattcagaagagccatgaaagtccaaggcagatcccttggtgaattgggtttcaaatctcaaaccggtgtttggggctctatctactcctgtatcatgatgatcctgattcttattggccaattctgggtcgccatcgcccccattggcgaaggtaagctggacgctcaagccttcttcgagaactacctggccatgccgatcctgattgtactgtacgtgggttacaaaatgtggaacaaggattggaaactgttcattagagccgataagatcgatttgacctctcacagacaaatcttcgacgaagaattaatcaagcaagaagatgacgaatacagagaacgtttgagaaccggcccttattggagaagggtcttggccttctggtgttga

SEQ ID NO: 7247 - protein, 633 aa, Saccharomyces bayanus
MSSSTSPYELKDLKNSSTEVHAAEQENEIEYFETDSNDRPSQQPHLDYEQHNTSAVRRFLDSFKRADQDQEQEAEVAQMNDLTSAISPSSRQAHELEKDETTDKIAPHTGHKSDSLKKTIQPRHVLMIALGTGIGTGLLVGNGTALVHAGPAGLLIGYAIMGSILYCIIQACGEMALVYSNLTGGYNAYPSFLVDDGFGFAVAWVYCLQWLCVCPLELVTASMTIKYWTTSVNPDVFVIIFYVLVITINIFGARGYAEAEFFFNCCKILMMTGFFILGIIIDVGGAGNDGYIGGKYWHEPGAFNGVHAIDRFKGVVATLVTAAFAFGGSEFIAITTAEQSNPRKAIPGAAKQMIYRILFLFLATIIIVGFLVPYNSDQLLGSSGGGTKASPYVIAIASHGVRVAPHFVNAVILLSVLSMANSSFYSSARLFLTLSEQGYAPKIFSYIDRAGRPLIAMCVSALFAVIAFCAASPKEDQVFTWLLAISGLSQLFTWTAICLSHIRFRRAMKVQGRSLGELGFKSQTGVWGSIYSCIMMILILIGQFWVAIAPIGEGKLDAQAFFENYLAMPILIVLYVGYKMWNKDWKLFIRADKIDLTSHRQIFDEELIKQEDDEYRERLRTGPYWRRVLAFWC

SEQ ID NO: 7248 - DNA, 1902 bp, Saccharomyces cerevisiae
  CDS (1)..(1902)
atgtcgtcgtcgaagtctctatacgaactgaaagacttgaaaaatagctccacagaaatacatgccacggggcaggataatgaaattgaatatttcgaaacaggctccaatgaccgtccatcctcacaacctcatttaggttacgaacagcataacacttctgccgtgcgtaggtttttcgactcctttaaaagagcggatcagggtccacaggatgaagtagaagcaacacaaatgaacgatcttacgtcggctatctcaccttcttctagacaggctcaagaactagaaaaaaatgaaagttcggacaacataggcgctaatacaggtcataagtcggactcgctgaagaaaaccattcagcctagacatgttctgatgattgcgttgggtacgggtatcggtactgggttattggtcggtaacggtaccgcgttggttcatgcgggtccagctggactacttattggttacgctattatgggttctatcttgtactgtattattcaagcatgtggtgaaatggcgctagtgtatagtaacttgactggtggctacaatgcataccccagtttccttgtggatgatggttttgggtttgcagtcgcttgggtttattgtttgcaatggctgtgtgtgtgtcctctggaattggtgaccgcatccatgactatcaaatattggacgacatctgtgaacccggatgtgttcgtcattattttctatgttttggtgattactattaatattttcggtgctcgtggttatgcagaagctgagttcttcttcaactgttgcaaaattttgatgatgactgggttcttcattcttggtattatcatcgatgttggtggcgctggtaatgatggttttattggtggtaaatactggcacgatccgggcgctttcaatggtaaacatgccattgacagatttaaaggtgttgctgcaacattagtgactgctgcttttgcctttggtggttcagagtttattgccatcaccactgcagaacaatctaatccaagaaaggccattccaggtgcggccaaacaaatgatctacagaatcttattcctattcttggctaccattattctactgggtttcttggtgccatacaattccgatcaattattgggttctaccggtggtggtactaaagcctcgccatatgtcattgctgttgcatcccacggtgtccgtgtcgtcccacacttcattaacgccgttattctactttccgtgctgtccatggctaactcctccttctactccagtgctcgtttatttttaactctatccgagcaaggttacgctcctaaggttttctcctacatcgacagagccggtagaccattgattgccatgggtgtttctgcattgtttgccgttattgccttctgtgctgcatctcccaaggaagaacaagttttcacttggttattggccatttctggtttgtctcagcttttcacatggactgccatttgtttatcccatcttagatttagaagagccatgaaagtccaagggagatctcttggagaattgggtttcaaatctcaaactggtgtttggggatctgcctacgcttgcattatgatgattttaattcttattgcccaattttgggtcgctatcgcccccattggtgaaggtaagctggatgcacaagcctttttcgaaaactacttggctatgccaatcttgattgcactttatgtcggctacaaggtctggcacaaggattggaaactgttcatcagggcagacaagatcgacctagattctcatagacaaatctttgatgaagaattaatcaagcaagaagacgaagaatatagggaacgtttgaggaacggaccttattggaaaagggtcgttgccttctggtgttaa

SEQ ID NO: 7249 - protein, 633 aa, Saccharomyces cerevisiae
MSSSKSLYELKDLKNSSTEIHATGQDNEIEYFETGSNDRPSSQPHLGYEQHNTSAVRRFFDSFKRADQGPQDEVEATQMNDLTSAISPSSRQAQELEKNESSDNIGANTGHKSDSLKKTIQPRHVLMIALGTGIGTGLLVGNGTALVHAGPAGLLIGYAIMGSILYCIIQACGEMALVYSNLTGGYNAYPSFLVDDGFGFAVAWVYCLQWLCVCPLELVTASMTIKYWTTSVNPDVFVIIFYVLVITINIFGARGYAEAEFFFNCCKILMMTGFFILGIIIDVGGAGNDGFIGGKYWHDPGAFNGKHAIDRFKGVAATLVTAAFAFGGSEFIAITTAEQSNPRKAIPGAAKQMIYRILFLFLATIILLGFLVPYNSDQLLGSTGGGTKASPYVIAVASHGVRVVPHFINAVILLSVLSMANSSFYSSARLFLTLSEQGYAPKVFSYIDRAGRPLIAMGVSALFAVIAFCAASPKEEQVFTWLLAISGLSQLFTWTAICLSHLRFRRAMKVQGRSLGELGFKSQTGVWGSAYACIMMILILIAQFWVAIAPIGEGKLDAQAFFENYLAMPILIALYVGYKVWHKDWKLFIRADKIDLDSHRQIFDEELIKQEDEEYRERLRNGPYWKRVVAFWC

SEQ ID NO: 7250 - DNA, 1830 bp, Saccharomyces cerevisiae
  CDS (1)..(1830)
atgctatcttcagaagattttggatcttctgggaaaaaggaaacttctcctgattcgatatcgatacgttcctttagtgccgggaataatttccaatcatcatcaagtgagaaaacttattctaagcaaaaatccgggagtgacaaacttatacatagatttgcggattcattcaaaagagccgagggtagcactacaagaactaagcaaataaatgaaaatacgtctgatttagaggatggcgttgagtctatcacgtcggattccaagttgaaaaagtccatgaagtcgcgccatgttgtcatgatgtctttagggacaggtattgggactggtcttttggtagctaatgcaaaaggtctacattacggtggtcctgctgcgctaataattggttacatcttggtttctttcgagacgtacttcatgatccaagctgcaggtgagatggcggtaacctatccgactttaccagcaaatttcaacgcatactcctccatattcatttccaaatcatttggattcgccacagtatggctttactgtttccaatggctaacggttttgcctttagagttaataaccgcgtctatgactattcaatttgggaatgataaaataaatccggacatttatattcttattttctatgttttcttagtattcattcatttcttcggtgtaaaagcctatggtgaaacggaattcatcttcaattgctgtaaaattttaatgattgcaggtttcattattctttctattgttatcaactgtggtggggccggaaatgacggttatatcggggccacttattggcataatccaggtgcttttgcaggtgacacatcgattggtaggttcaaaaacgtttgctatattttagttactgcttacttctcctttggtggtatggaattatttgcactaagtgttcaggaacagtctaaccctagaaaatctactccggtggcagccaagagaagcatttatcgtatcgttgtgatttatcttttgactatgatcctcattggattcaatgttccatataatgatgaccaactaatgggcgcaggcggatccgctacacatgcatctccctatgtcttagccgcttctattcacggtgtgaaaattgttccacatattatcaacgctgttattttgatttctgtggtttcagtggcaaattcctctttgtatgctggtccaagactgatttgctctttggcccaacaaggctacgcacccaagtttttagattacgttgacagagagggcaggcccttgagagctcttattgtgtgttgcgttttcggcgtcattgcttttgttgcagcttcatcaaaggaagagatcgtgtttacatggttagcagctatcgcaggcttgagtgaattattcacatggacttccataatgttgtcccatctgcgattcagacaagcaatgaaagtacagggaaggtctctagacgagttgggatacaaggccacaacagggatttggggttccatatacggtgtcttttttaatattttagtctttgttgcccaattttgggtagcattggcccccttaggtaatgggggcaaatgcgatgcggaatccttctttcaaaattatttagcttttccaatatggttggccttttacttcggatatatggtttacaaccgagattttacgctattaaatcccctcgacaagattgaccttgacttccacagacgcatttatgatccagagctaatgagacaagaggacgaagaaaataaagaaaaactaaggaatatgtctttgatgagaaaagcttatcatttctggtgttaa

SEQ ID NO: 7251 - protein, 609 aa, Saccharomyces cerevisiae
MLSSEDFGSSGKKETSPDSISIRSFSAGNNFQSSSSEKTYSKQKSGSDKLIHRFADSFKRAEGSTTRTKQINENTSDLEDGVESITSDSKLKKSMKSRHVVMMSLGTGIGTGLLVANAKGLHYGGPAALIIGYILVSFETYFMIQAAGEMAVTYPTLPANFNAYSSIFISKSFGFATVWLYCFQWLTVLPLELITASMTIQFGNDKINPDIYILIFYVFLVFIHFFGVKAYGETEFIFNCCKILMIAGFIILSIVINCGGAGNDGYIGATYWHNPGAFAGDTSIGRFKNVCYILVTAYFSFGGMELFALSVQEQSNPRKSTPVAAKRSIYRIVVIYLLTMILIGFNVPYNDDQLMGAGGSATHASPYVLAASIHGVKIVPHIINAVILISVVSVANSSLYAGPRLICSLAQQGYAPKFLDYVDREGRPLRALIVCCVFGVIAFVAASSKEEIVFTWLAAIAGLSELFTWTSIMLSHLRFRQAMKVQGRSLDELGYKATTGIWGSIYGVFFNILVFVAQFWVALAPLGNGGKCDAESFFQNYLAFPIWLAFYFGYMVYNRDFTLLNPLDKIDLDFHRRIYDPELMRQEDEENKEKLRNMSLMRKAYHFWC

SEQ ID NO: 7252 - DNA, 1779 bp, Saccharomyces cerevisiae
  CDS (1)..(1779)
atgaccgaagactttatttcttctgtcaagcgttcaaatgaggagctgaaggagcgaaaatctaactttggatttgtagaatacaaatccaagcaattaacatcatcctcatcacacaattcaaactcatcgcatcacgatgatgacaaccaacacggcaagaggaatattttccagcgatgtgttgattctttcaagtctcctctggacggctcgttcgacacaagtaatttgaagaggactctgaaaccaaggcacttaatcatgattgccattgggggcagtataggtactggtttgtttgtcggtagtggtaaggcaatcgccgaaggtggtcctcttggtgtcgtcattggttgggctattgcaggctctcaaatcatcgggacgattcatgggctaggtgaaatcacggtgcggtttcccgttgtcggggcctttgccaattacggcacaaggtttttggatccaagtataagttttgttgtttcgaccatatacgtgctacagtggttttttgtattacccttagaaatcattgcggcggcaatgaccgtacagtactggaactcgtctattgaccccgtaatttgggtagccatcttttatgctgttattgtttccataaatttgtttggtgtacgaggttttggggaagcggaatttgcattttccaccataaaagcaataacagtttgcggattcattatattgtgcgttgtcctcatttgcggtggaggtcccgaccacgagttcattggcgccaaatactggcacgaccctggttgtttggccaatgggttcccgggcgttctatctgttcttgttgttgcttcgtattctctcggtggtatagaaatgacgtgcctggcatcaggtgaaacggaccccaaaggcttaccaagtgctatcaagcaagtgttttggaggatcttatttttctttttgatatcactgaccctggtaggattcctggttccatatacaaaccaaaacttactgggtggttcatctgtggacaactcaccttttgtcattgccataaaattgcatcacattaaagccttgccctccatcgtcaatgcggtcatccttatcagtgttttgagtgtaggtaactcctgcatcttcgcttcaagtagaacgttgtgttcgatggcccaccaaggccttattccatggtggtttggttatatcgaccgtgctggtaggccgctggttggcattatggcaaattcactatttggattactagcatttctggtcaaatctggctcgatgtctgaagttttcaattggttaatggccattgccggcctggccacgtgcattgtctggttgagcatcaacctgtcacatatcagatttagactggcgatgaaggctcaagggaagtctctggatgaattagaatttgttagtgctgtcgggatttggggatcagcgtattccgctttaatcaactgtctaatcttgatagctcaattctattgttcactatggcccattggtggctggaccagcggcaaagaaagggctaaaatattttttcaaaattatctgtgtgccttaatcatgttatttatattcatcgtccacaaaatttattacaagtgtcaaacaggcaaatggtggggggttaaggcgttaaaggacatagatttggaaaccgatcgtaaagatatcgacatcgaaatagtcaagcaagaaattgccgaaaagaaaatgtacctagattcccgtccatggtacgtgagacagttccatttctggtgttaa

SEQ ID NO: 7253 - protein, 592 aa, Saccharomyces cerevisiae
MTEDFISSVKRSNEELKERKSNFGFVEYKSKQLTSSSSHNSNSSHHDDDNQHGKRNIFQRCVDSFKSPLDGSFDTSNLKRTLKPRHLIMIAIGGSIGTGLFVGSGKAIAEGGPLGVVIGWAIAGSQIIGTIHGLGEITVRFPVVGAFANYGTRFLDPSISFVVSTIYVLQWFFVLPLEIIAAAMTVQYWNSSIDPVIWVAIFYAVIVSINLFGVRGFGEAEFAFSTIKAITVCGFIILCVVLICGGGPDHEFIGAKYWHDPGCLANGFPGVLSVLVVASYSLGGIEMTCLASGETDPKGLPSAIKQVFWRILFFFLISLTLVGFLVPYTNQNLLGGSSVDNSPFVIAIKLHHIKALPSIVNAVILISVLSVGNSCIFASSRTLCSMAHQGLIPWWFGYIDRAGRPLVGIMANSLFGLLAFLVKSGSMSEVFNWLMAIAGLATCIVWLSINLSHIRFRLAMKAQGKSLDELEFVSAVGIWGSAYSALINCLILIAQFYCSLWPIGGWTSGKERAKIFFQNYLCALIMLFIFIVHKIYYKCQTGKWWGVKALKDIDLETDRKDIDIEIVKQEIAEKKMYLDSRPWYVRQFHFWC

SEQ ID NO: 7254 - DNA, 1860 bp, Saccharomyces cerevisiae
  CDS (1)..(1860)
atggacgatagtgtcagtttcattgccaaagaggccagtccagcacaatattcgcacagtttgcatgaaagaacacacagtgaaaaacaaaagagagactttacaataacagaaaaacaagatgaggtatctggacaaacagcggagcctcgaaggacggacagcaaatccatattacagaggaaatgcaaagaattcttcgactcttttaaaaggcagctgccaccagaccgtaattccgaactagagtcccaagaaaaaaacaacctgacaaagtcgatcaaatctcgtcacttagtcatgatcagtctcggtaccggtataggtactggtttactggtcggtaatggtcaggtgctgggaacagctggtcctgccgggttagtccttggttacggaatagcatcgatcatgctttactgtatcatccaagcggcaggcgagttaggtctctgttatgcaggactaaccggcaattacaccagatatccttctattttagtcgacccttcgttgggttttgcagtttctgtggtttacaccattcaatggctaactgttctgcccttacaattggtcactgcggcaatgacagttaagtactggacgagtgtaaatgcagacatctttgttgccgtggttttcgtttttgtaattatcattaatctatttgggtccagaggctatgctgaagccgagttcattttcaattcctgtaagatattgatggtaatcggattcgtcattctggcgattatcatcaattgtgggggtgcaggtgacagaagatacatcggtgctgagtactggcacaatcctggtccatttgcccacggtttcaaaggtgtatgtacggttttctgttatgctgcattcagctacggtggaattgaagttctacttctatctgccgctgagcaggaaaacccaacaaaatctattcccaatgcctgcaaaaaagtggtataccgtattctgctgatttacatgctcaccaccattttggtttgctttcttgttccatacaacagtgacgaattattagggtctagtgactcctctggatcccatgcctccccatttgtcattgctgttgcatcacatggtgtcaaagttgtgcctcactttataaatgctgttattttgatttctgtcatttctgttgcaaactcttcgttatattctgggccaagattgttattatcattggcagaacaaggcgtcttacctaaatgcttagcatatgttgatagaaacggcaggcctttactttgtttttttgtttcccttgtctttggatgcattgggtttgtagccactagtgacgctgaagaacaggttttcacctggttattggcaatttctagtctttcgcaattatttatctggatgtcaatgtccttgtcacatataagatttagagatgccatggcaaagcaaggtcgttcgatgaacgaagttggatacaaagcacaaactggctattggggttcatggcttgcagttttaattgcaatcttcttccttgtgtgccagttctgggtagccatcgcacctgttaatgaacatggaaaacttaacgtcaaagtgtttttccaaaattatttggcaatgcccatcgttttgtttgcctattttggtcacaagatatacttcaaatcatggagcttttggattccagccgaaaaaattgatttggactcacatagaaacatatttgtgtctccatcgcttacagagatcgacaaagttgacgataacgatgatcttaaagagtatgaaaattcagaatcgtcggaaaatccaaacagttcgcgttcaagaaagttttttaagaggatgaccaatttctggtgctaa

SEQ ID NO: 7255 - protein, 619 aa, Saccharomyces cerevisiae
MDDSVSFIAKEASPAQYSHSLHERTHSEKQKRDFTITEKQDEVSGQTAEPRRTDSKSILQRKCKEFFDSFKRQLPPDRNSELESQEKNNLTKSIKSRHLVMISLGTGIGTGLLVGNGQVLGTAGPAGLVLGYGIASIMLYCIIQAAGELGLCYAGLTGNYTRYPSILVDPSLGFAVSVVYTIQWLTVLPLQLVTAAMTVKYWTSVNADIFVAVVFVFVIIINLFGSRGYAEAEFIFNSCKILMVIGFVILAIIINCGGAGDRRYIGAEYWHNPGPFAHGFKGVCTVFCYAAFSYGGIEVLLLSAAEQENPTKSIPNACKKVVYRILLIYMLTTILVCFLVPYNSDELLGSSDSSGSHASPFVIAVASHGVKVVPHFINAVILISVISVANSSLYSGPRLLLSLAEQGVLPKCLAYVDRNGRPLLCFFVSLVFGCIGFVATSDAEEQVFTWLLAISSLSQLFIWMSMSLSHIRFRDAMAKQGRSMNEVGYKAQTGYWGSWLAVLIAIFFLVCQFWVAIAPVNEHGKLNVKVFFQNYLAMPIVLFAYFGHKIYFKSWSFWIPAEKIDLDSHRNIFVSPSLTEIDKVDDNDDLKEYENSESSENPNSSRSRKFFKRMTNFWC

SEQ ID NO: 7256 - DNA, 1746 bp, Schizosaccharomyces pombe
  CDS (1)..(1746)
atgtcacatagcgattacaatttcgatattgagcaaaacgcttttgaaaaggaagcaccgaaggtgtccatcgaaagaaaaggagatgtcgttgaggaagaggtaatagctaccggcgaagtcgagaattatgctgaaccaaagagtagaaactttttgcagagattttttgacgactttaagcctgctttaacaactcgtggtgacggtgtagcactgaaacgaaaattgacatccagacacatgcagatgatttcggttggaggagccattggtagtggtctgtatgttggttcaggcagtgcattcgcagatggcggcccagcctcagtaattatcaattatatcttaattggaattatgatgatttttgttatttacgctctcggcgaattagcaattgcttatccagttgctggcagttttaatacttatgcaacgcgcttcattgatcctgcctggggatttgctgttagctggaattactttcttaattattttgtcacgtgtccattggaactaacaacgtgtgccattacttttaaattttggacagaaattaatagtgcagcgtggattagcatttttttagcggttgttattgtcatcaatctttttggagttcgtgcatacggagaagtggaatttatattgagtactattaaagtaattgctaccgttggtttcattattttagccatcattattaactgtggaggtgtaccaaccgaccatcgaggatatattggtggcagtattatcaaacaaaaaccatttcgacatggattcaaaggattttgttcagtttttaccactgctgctttctccttttctggaactgaaattattggactggcagcagccgaagttggtaatccaaggaaatccgtacccagtgctgttaaacaagtgttttggcgtattgctatcttttatgttgtctctttaatattgattggattgttggtcagtccggatgatcctagattgatgggcaacggcgatgtcagcgtttcaccttttgttctagctattcaagaagctaatattaaaggtcttccttctgtttttaacgctgtcattattatttcggtagtttcggtaaccaattctactacgtacactgcagctcgtacccttcaaggtatggcaactctcaagcaagcacccaagtttttttcttatactgatcgagttggccgtcctttaatagccatggttgtggttctcttatttggcttctttgcatacattaatgaagccgacaaaaacggaagcgatatcagcgacacagtgttcgactggttactagcaatctcaggattgtcaagcttttttacttggggaagtatatgtttatctcatattatgttccgtttagcatttaagaagcaaggtcattccttaaaggagttgggatttgtgtctcccatgggaatctggggttcagtcattggattgggtttcaacatattatgtttgatggctgagttttatgtatctctgttcctcataggtggtagtccgaatgctaatgatttctttcaaggatatctagctgcctgcattgctttagctttttttattggttacaagatttacgacagatcgcatattccctctttggataaactagatatcgatactggacttaaaacttatgacaaccaagatgaagaaaaagaagaatattcttccaagggtcctctaaacattttgaaaaaagcatggaatgccgtttgctga

SEQ ID NO: 7257 - protein, 581 aa, Schizosaccharomyces pombe
MSHSDYNFDIEQNAFEKEAPKVSIERKGDVVEEEVIATGEVENYAEPKSRNFLQRFFDDFKPALTTRGDGVALKRKLTSRHMQMISVGGAIGSGLYVGSGSAFADGGPASVIINYILIGIMMIFVIYALGELAIAYPVAGSFNTYATRFIDPAWGFAVSWNYFLNYFVTCPLELTTCAITFKFWTEINSAAWISIFLAVVIVINLFGVRAYGEVEFILSTIKVIATVGFIILAIIINCGGVPTDHRGYIGGSIIKQKPFRHGFKGFCSVFTTAAFSFSGTEIIGLAAAEVGNPRKSVPSAVKQVFWRIAIFYVVSLILIGLLVSPDDPRLMGNGDVSVSPFVLAIQEANIKGLPSVFNAVIIISVVSVTNSTTYTAARTLQGMATLKQAPKFFSYTDRVGRPLIAMVVVLLFGFFAYINEADKNGSDISDTVFDWLLAISGLSSFFTWGSICLSHIMFRLAFKKQGHSLKELGFVSPMGIWGSVIGLGFNILCLMAEFYVSLFLIGGSPNANDFFQGYLAACIALAFFIGYKIYDRSHIPSLDKLDIDTGLKTYDNQDEEKEEYSSKGPLNILKKAWNAVC

SEQ ID NO: 7258 - DNA, 1758 bp, Schizosaccharomyces pombe
  CDS (1)..(1758)
atgaatgcttatgttagggattctgaatccgtatattcagaatcgtatcctcccgaaaacttcataagtaatgaacccgagaaatcaaaagataaagacaatttcaacggcgaagaagtcatttcttatgtcggtgaggtcgaaacagtccctgccaaagaagagaatgtatttcgacgattcattaatggatttaaaattgaaaaaaaccaacaagattctgccggacaaggactaaagcgtcggcttaagagtcgtcatattcaaatgatcggtattggtggagctattggtaccggtgtttgggtgggaagctctaaatctctttatagggggggagcagcgtcagttttaattgactactgtattgttggaactatggttttttgtactgtttatgctttaggagaattagctgttgcctttcctacgcggggaagttttgttacacatgctacgcgattcatcgatgaatcatggggctttgcacttagttggaattatgtattctcgttcattgttacgattccattagagttgacgacaggaacaatgatgatcaaatattggaccaatctaaacagtggtatatgggtgacagttttcatcgtgttcctattttttattaatatctttggagtaaaaggatatggtgaaatggagtttatcatgtctactatcaaagtggttgcaatgtgtggttttatcattcttggtatcattattgattgcggtggtgtaccaactgatcatcgaggctatatgggaacacatattttccgcgaaaatgcttttcgccacaaatttaaaggattttgcgctgtatttaccagtgctgcattttctttttccggtactgaatatgttggtgtcgcagcagctgaaacagagaaccccgcgaaggcctttccggttgcagtaagacaaacgctattcagaatagcaatattctacatactttcacttttcattgttagtttactcattagtggtgctgaccctcggttaacttcataccatggagttgatgcaagtccatttgtgctagctattaaagatgctaacatcaaagcgttaccttcaattctgaatgccattattttgatctccgtaatctcttctgctaatgctcagttgtacgctggaagtcgcgcaattcattccttagggtgtaatggctttgctcctaagtgttttacactggttgatcgtgaaggtcgacctctcgttgctcttcttattttgttcttgtttatgtttttaggttaccttgtcgaaacaggacaatatgacactgtatttgactggatgctgtcgatttctggtttgggtacattattttgctggggcagtatatgtctagcacatattcggtatagagccgctatgaaacatcaaaacaggagcctcaaagaggttggatttgtctctccatttaatgtttatgcttcctattatgcttttatactagtttgcttagtgttggctgcagaattttatgtctccattttccctgttggcggtaaaccagatgccagtgcattttttgaaaactatttatctgctcctgtaattctagttttttttatatgccacaagctttattacaaaaccaaacgaattactctttcaaatatggatttggaaactgattttgcatacaaaactccagtggaagaagaagaagaagaagagaagagtgctggttccctaagtatcaaacaaagaatgaaaaagctatctgatatgatgtgctaa

SEQ ID NO: 7259 - protein, 585 aa, Schizosaccharomyces pombe
MNAYVRDSESVYSESYPPENFISNEPEKSKDKDNFNGEEVISYVGEVETVPAKEENVFRRFINGFKIEKNQQDSAGQGLKRRLKSRHIQMIGIGGAIGTGVWVGSSKSLYRGGAASVLIDYCIVGTMVFCTVYALGELAVAFPTRGSFVTHATRFIDESWGFALSWNYVFSFIVTIPLELTTGTMMIKYWTNLNSGIWVTVFIVFLFFINIFGVKGYGEMEFIMSTIKVVAMCGFIILGIIIDCGGVPTDHRGYMGTHIFRENAFRHKFKGFCAVFTSAAFSFSGTEYVGVAAAETENPAKAFPVAVRQTLFRIAIFYILSLFIVSLLISGADPRLTSYHGVDASPFVLAIKDANIKALPSILNAIILISVISSANAQLYAGSRAIHSLGCNGFAPKCFTLVDREGRPLVALLILFLFMFLGYLVETGQYDTVFDWMLSISGLGTLFCWGSICLAHIRYRAAMKHQNRSLKEVGFVSPFNVYASYYAFILVCLVLAAEFYVSIFPVGGKPDASAFFENYLSAPVILVFFICHKLYYKTKRITLSNMDLETDFAYKTPVEEEEEEEKSAGSLSIKQRMKKLSDMMC

SEQ ID NO: 7260 - DNA, 1743 bp, Schizosaccharomyces pombe
  CDS (1)..(1743)
atggaaccagaatatgtctcttttagcgacaaggacactaaatctatcctaaatgaaagcaaatcttctttgaaggatgtcaaaccttctttggaggaaaagagttacattaccccgggattagttgacgatgtggagcctaagggtaaaaacttcgtagtacgcttttttgatgactttaagcctgcaaaggcaacgggagaagatggcacggcgcttaagcgtagtctgaaaagccggcatatgcaaatgatatctattggaggtgcaattggtacaggtctatatgtcggttcaggtagttcgcttgcagatggcggacccgcttcagtgatcattaattacagcttaattggaattatgatgttctttattgtttatgcgcttggtgaaatggctgttgcttatccggtcgctggtggattcaatacctatgctacccgtttcattgatccagcttggggatttgcggtaagttggaactacttcatcaactatttcgttacttttccacttgaattaacaacttgcgctatcacatttcggtactggacggatattaatagcgcagcttggatctctatttttctggttgtcattattatagtcaatctttttggcgttcgcgcatatggagaagtggagtttattttaagtactgttaaagtggtcgctacctttggattcatcattttggccatcatcatcaattgcggtggtgttccaactgatcaccggggttacattggcggaagtattataaaacataagccgtttcgacatgggttcaaaggattttgttctgtctttactactgcggctttctccttttctggtactgaagtcattggtttagcggcggctgaagttgacaatcctcagaaagcgcttcctcatgccgttaagcaagttttttggcgtattgctatattttatgttgtctccttgatattgatcggtttgcttattagccccgatgatcctaatttgatgggaaatggctctaccagtgtgtcacctttcgtacttgctattaaagaagcaaacatcaaaggcctaccttccgtttttaacgctgttattattatttccgtcgtttctgtgacaaattccagcacatatacagccggtcgtaccctccatggtatggcgaatttaaagcaggcaccctccttctttaaatataccgatcgtcttggtcgtcctttacttgccatgatcgttgttctgttatttggattctttgcttatatcaacgaagctgataaaaatggtaacgatgttagtgatacggtattcaattggttgcttgctctatctggtctgtcaaacttttttacctggggaagtatatgtctttgtcatatcatatttcgcttggcgtttaagaaacaaggacattccctaaaagaattgggatttgtatctcctatgggtatttggggatcttgcattggattatttttcaatattttatgccttatggcacaattttatgtctccttatttccaatcggtggaaaaccaaatgcaaatgattttttccaggggtatttggcggcacccgttacactcgctttttttatcggttataaaatatatgatagatcgcacatcccttctttggataaactagacattactactggtcttaaaacatatgagaatctcgatgaagaagaagatgagcccaccactgcttctaagaggattttcaagaaaatcagttcggttttctgttaa

SEQ ID NO: 7261 - protein, 580 aa, Schizosaccharomyces pombe
MEPEYVSFSDKDTKSILNESKSSLKDVKPSLEEKSYITPGLVDDVEPKGKNFVVRFFDDFKPAKATGEDGTALKRSLKSRHMQMISIGGAIGTGLYVGSGSSLADGGPASVIINYSLIGIMMFFIVYALGEMAVAYPVAGGFNTYATRFIDPAWGFAVSWNYFINYFVTFPLELTTCAITFRYWTDINSAAWISIFLVVIIIVNLFGVRAYGEVEFILSTVKVVATFGFIILAIIINCGGVPTDHRGYIGGSIIKHKPFRHGFKGFCSVFTTAAFSFSGTEVIGLAAAEVDNPQKALPHAVKQVFWRIAIFYVVSLILIGLLISPDDPNLMGNGSTSVSPFVLAIKEANIKGLPSVFNAVIIISVVSVTNSSTYTAGRTLHGMANLKQAPSFFKYTDRLGRPLLAMIVVLLFGFFAYINEADKNGNDVSDTVFNWLLALSGLSNFFTWGSICLCHIIFRLAFKKQGHSLKELGFVSPMGIWGSCIGLFFNILCLMAQFYVSLFPIGGKPNANDFFQGYLAAPVTLAFFIGYKIYDRSHIPSLDKLDITTGLKTYENLDEEEDEPTTASKRIFKKISSVFC

SEQ ID NO: 7262 - DNA, 1752 bp, Schizosaccharomyces pombe
  CDS (1)..(1752)
atgtcgtcgccagatcgctctattgacattgaccttgaaaaatatccttcaacggctaccaagtccgtctacggccaatcgaaggatgataaaaatgttttcgacattcatcccaccgaatccgaagtcatccccggtgaagtcgagtatgctgatactccttcccatcaaaatttcttgcaaaagttttttagcgacttcaaacccgttaaagccgaccgcgaggatggtgtcgcattaaagcgtcatctgaaaggtaggcatatgcaaatgattgccattggtggtgctattggtactggtttgtttgtgggttctggtagttcacttgctgatggtggaccggcttctgttattatcgattatactttgattggtattatgatgttctttactgtctatgctttaggtgaacttgctgtttcttatcctgtcgctggtggtttctataattacgcagttcgttttatcgatccagcctggggctttgccgttggttggaactatttcatgaattatttcgttacatttccactggagttaactacttgtgccatcactttccgctactggacagacattaatagttgtgcttggattacgattttcttggtatttgttatatgtatcaatcttttcggtgttagaggttatggtgaagttgaatttattctatctacgctcaaagttgttgccactactggttttattattttggctattattattaattgcggtggtgttcctactgatcctcgtggctacatcggtggtaaaattattaaaaacaaacctttccgtcatagctttaaaggtttttgttccgtgtttactactgccggtttctccttctcaggtactgaagttgttggtttagctgctgctgaagctgaagatcctcaaaagtctctccctcgtgctaccaaacaggtcttttggcgtattgctattttctacgtcgtatctttaattttaattggtctgcttgtttcaccagatgatcctcgtttgatgggtaatagcagcgatggtagtacctctcccttcgtgttggccattaaagaagcaaacatcagaggccttccttccgttttcaatgcagtaattatcatttctaccgtctctgttgcaaattcttgtactttcactgctagtcgtactcttcatgctatggccgctaaaggtgacgcacctcgcttctttgcatatactgatcgtcttggtcgtcccctcctcgctatggctgtttgtttgttgtttggattttttgcatatatcaatgccgccggtgatgttagtgacactgttttcgattggttattggctatttccggtatctcaaacttcttctcatggggcagtattaatctttgccatatcgtcttccgtcttgctatgaagaaacaaggccgttctttggatcaacttggatttgtatcacctatgggtatttggggttctgctattggattggctttcaacattttgtgtcttatggccgaattctatgtatctttgttccccatcggttcaaagccaaatgctaacgattttttccaaggatatcttgctgctccaattgtgattgctttctttattggctacaaaatttatgatagaagtcatattccctcattgagtaaacttgatttagacacgggacttcgtacctatcctccaaaagataaagaatctgagaaaattcgtgatgcgaagggtttctttaagtggatttggcaatctctttgctaa

SEQ ID NO: 7263 - protein, 583 aa, Schizosaccharomyces pombe
MSSPDRSIDIDLEKYPSTATKSVYGQSKDDKNVFDIHPTESEVIPGEVEYADTPSHQNFLQKFFSDFKPVKADREDGVALKRHLKGRHMQMIAIGGAIGTGLFVGSGSSLADGGPASVIIDYTLIGIMMFFTVYALGELAVSYPVAGGFYNYAVRFIDPAWGFAVGWNYFMNYFVTFPLELTTCAITFRYWTDINSCAWITIFLVFVICINLFGVRGYGEVEFILSTLKVVATTGFIILAIIINCGGVPTDPRGYIGGKIIKNKPFRHSFKGFCSVFTTAGFSFSGTEVVGLAAAEAEDPQKSLPRATKQVFWRIAIFYVVSLILIGLLVSPDDPRLMGNSSDGSTSPFVLAIKEANIRGLPSVFNAVIIISTVSVANSCTFTASRTLHAMAAKGDAPRFFAYTDRLGRPLLAMAVCLLFGFFAYINAAGDVSDTVFDWLLAISGISNFFSWGSINLCHIVFRLAMKKQGRSLDQLGFVSPMGIWGSAIGLAFNILCLMAEFYVSLFPIGSKPNANDFFQGYLAAPIVIAFFIGYKIYDRSHIPSLSKLDLDTGLRTYPPKDKESEKIRDAKGFFKWIWQSLC

SEQ ID NO: 7264 - DNA, 25 bp, Artificial sequence
  primer
atgtcagatcctatagtaacgtctt

SEQ ID NO: 7265 - DNA, 25 bp, Artificial sequence
  primer
ctaacaccaaaatttgtagactctg

SEQ ID NO: 7266 - protein, 608 aa, Artificial sequence
  consensus sequence
  Variant (2)..(4): Xaa in position 2 to 4 is any amino acid
  Variant (6)..(13): Xaa in position 6 to 13 is any amino acid
  Variant (14)..(57): Xaa in position 14 to 57 is any or no amino acid
  Variant (60)..(64): Xaa in position 60 to 64 is any amino acid
  Variant (67)..(68): Xaa in position 67 to 68 is any amino acid
  Variant (70)..(72): Xaa in position 70 to 72 is any amino acid
  Variant (74)..(75): Xaa in position 74 to 75 is any amino acid
  Variant (81)..(81): Xaa in position 81 is any amino acid
  Variant (83)..(87): Xaa in position 83 to 87 is any amino acid
  Variant (89)..(91): Xaa in position 89 to 91 is any amino acid
  Variant (94)..(97): Xaa in position 94 to 97 is any amino acid
  Variant (99)..(99): Xaa in position 99 is any amino acid
  Variant (101)..(107): Xaa in position 101 to 107 is any amino acid
  Variant (109)..(112): Xaa in position 109 to 112 is any amino acid
  Variant (114)..(114): Xaa in position 114 is any amino acid
  Variant (117)..(124): Xaa in position 117 to 124 is any amino acid
  Variant (125)..(125): Xaa in position 125 is any or no amino acid
  Variant (127)..(127): Xaa in position 127 is any amino acid
  Variant (129)..(130): Xaa in position 129 to 130 is any amino acid
  Variant (132)..(140): Xaa in position 132 to 140 is any amino acid
  Variant (144)..(145): Xaa in position 144 to 145 is any amino acid
  Variant (147)..(151): Xaa in position 147 to 151 is any amino acid
  Variant (153)..(156): Xaa in position 153 to 156 is any amino acid
  Variant (161)..(161): Xaa in position 161 is any amino acid
  Variant (163)..(165): Xaa in position 163 to 165 is any amino acid
  Variant (167)..(169): Xaa in position 167 to 169 is any amino acid
  Variant (171)..(180): Xaa in position 171 to 180 is any amino acid
  Variant (181)..(181): Xaa in position 181 is any or no amino acid
  Variant (184)..(189): Xaa in position 184 to 189 is any amino acid
  Variant (191)..(192): Xaa in position 191 to 192 is any amino acid
  Variant (195)..(197): Xaa in position 195 to 197 is any amino acid
  Variant (198)..(198): Xaa in position 198 is any or no amino acid
  Variant (200)..(200): Xaa in position 200 is any amino acid
  Variant (202)..(202): Xaa in position 202 is any amino acid
  Variant (205)..(205): Xaa in position 205 is any amino acid
  Variant (207)..(209): Xaa in position 207 to 209 is any amino acid
  Variant (211)..(215): Xaa in position 211 to 215 is any amino acid
  Variant (218)..(218): Xaa in position 218 is any amino acid
  Variant (221)..(226): Xaa in position 221 to 226 is any amino acid
  Variant (229)..(233): Xaa in position 229 to 233 is any amino acid
  Variant (234)..(236): Xaa in position 234 to 236 is any or no amino acid
  Variant (239)..(245): Xaa in position 239 to 245 is any amino acid
  Variant (246)..(247): Xaa in position 246 to 247 is any or no amino acid
  Variant (249)..(251): Xaa in position 249 to 251 is any amino acid
  Variant (252)..(256): Xaa in position 252 to 256 is any or no amino acid
  Variant (259)..(266): Xaa in position 259 to 266 is any amino acid
  Variant (268)..(268): Xaa in position 268 is any amino acid
  Variant (270)..(272): Xaa in position 270 to 272 is any amino acid
  Variant (274)..(274): Xaa in position 274 is any amino acid
  Variant (276)..(278): Xaa in position 276 to 278 is any amino acid
  Variant (280)..(282): Xaa in position 280 to 282 is any amino acid
  Variant (284)..(285): Xaa in position 284 to 285 is any amino acid
  Variant (288)..(288): Xaa in position 288 is any amino acid
  Variant (290)..(291): Xaa in position 290 to 291 is any amino acid
  Variant (293)..(293): Xaa in position 293 is any amino acid
  Variant (295)..(295): Xaa in position 295 is any amino acid
  Variant (297)..(300): Xaa in position 297 to 300 is any amino acid
  Variant (303)..(305): Xaa in position 303 to 305 is any amino acid
  Variant (307)..(313): Xaa in position 307 to 313 is any amino acid
  Variant (315)..(316): Xaa in position 315 to 316 is any amino acid
  Variant (319)..(323): Xaa in position 319 to 323 is any amino acid
  Variant (325)..(325): Xaa in position 325 is any amino acid
  Variant (327)..(332): Xaa in position 327 to 332 is any amino acid
  Variant (333)..(335): Xaa in position 333 to 335 is any or no amino acid
  Variant (338)..(338): Xaa in position 338 is any amino acid
  Variant (340)..(340): Xaa in position 340 is any amino acid
  Variant (342)..(350): Xaa in position 342 to 350 is any amino acid
  Variant (352)..(354): Xaa in position 352 to 354 is any amino acid
  Variant (360)..(360): Xaa in position 360 is any amino acid
  Variant (363)..(363): Xaa in position 363 is any amino acid
  Variant (365)..(366): Xaa in position 365 to 366 is any amino acid
  Variant (369)..(370): Xaa in position 369 to 370 is any amino acid
  Variant (372)..(374): Xaa in position 372 to 374 is any amino acid
  Variant (376)..(379): Xaa in position 376 to 379 is any amino acid
  Variant (381)..(383): Xaa in position 381 to 383 is any amino acid
  Variant (385)..(385): Xaa in position 385 is any amino acid
  Variant (389)..(391): Xaa in position 389 to 391 is any amino acid
  Variant (393)..(393): Xaa in position 393 is any amino acid
  Variant (396)..(396): Xaa in position 396 is any amino acid
  Variant (400)..(401): Xaa in position 400 to 401 is any amino acid
  Variant (403)..(413): Xaa in position 403 to 413 is any amino acid
  Variant (415)..(423): Xaa in position 415 to 423 is any amino acid
  Variant (424)..(429): Xaa in position 424 to 429 is any or no amino acid
  Variant (431)..(431): Xaa in position 431 is any amino acid
  Variant (434)..(434): Xaa in position 434 is any amino acid
  Variant (437)..(437): Xaa in position 437 is any amino acid
  Variant (441)..(442): Xaa in position 441 to 442 is any amino acid
  Variant (444)..(444): Xaa in position 444 is any amino acid
  Variant (446)..(447): Xaa in position 446 to 447 is any amino acid
  Variant (449)..(450): Xaa in position 449 to 450 is any amino acid
  Variant (453)..(453): Xaa in position 453 is any amino acid
  Variant (457)..(457): Xaa in position 457 is any amino acid
  Variant (459)..(461): Xaa in position 459 to 461 is any amino acid
  Variant (464)..(464): Xaa in position 464 is any amino acid
  Variant (467)..(467): Xaa in position 467 is any amino acid
  Variant (469)..(469): Xaa in position 469 is any amino acid
  Variant (471)..(475): Xaa in position 471 to 475 is any amino acid
  Variant (477)..(478): Xaa in position 477 to 478 is any amino acid
  Variant (481)..(493): Xaa in position 481 to 493 is any amino acid
  Variant (496)..(496): Xaa in position 496 is any amino acid
  Variant (498)..(500): Xaa in position 498 to 500 is any amino acid
  Variant (502)..(503): Xaa in position 502 to 503 is any amino acid
  Variant (504)..(508): Xaa in position 504 to 508 is any or no amino acid
  Variant (510)..(512): Xaa in position 510 to 512 is any amino acid
  Variant (513)..(515): Xaa in position 513 to 515 is any or no amino acid
  Variant (518)..(519): Xaa in position 518 to 519 is any amino acid
  Variant (523)..(523): Xaa in position 523 is any amino acid
  Variant (525)..(531): Xaa in position 525 to 531 is any amino acid
  Variant (534)..(547): Xaa in position 534 to 547 is any amino acid
  Variant (548)..(553): Xaa in position 548 to 553 is any or no amino acid
  Variant (556)..(586): Xaa in position 556 to 586 is any amino acid
  Variant (587)..(607): Xaa in position 587 to 607 is any or no amino acid
FXXXFXXXXXXXXXXXXXXXXXXXXXXXXXXXXXXXXXXXXXXXXXXXXXXXXXXXXLKXXXXXRHXXMXXXGXXIGTGLXVXXXXXLXXXGPXXXXIXYXXXXXXXYXXXXAXGEXXXXXXXXXGXFXXYXXXXXXXXXGFAXXWXXXXXWXXXXPLELXTXXXTXXXWXXXXXXXXXXXIFXXXXXXIXXFGXXXXYXEXEFXFXXXKXXXXXGFXILXXXXXXGGXXXXXXXXIGXXXXXXXXXFXXXXXXXXFKXXXXXXXXAXFXXXGXEXXXLXXXEXXNPXKXXPXAXKXXXXRIXXXYXXXXXXXGXXVPXXXXXLXGXXXXXXXXXSPXVXAXXXXXXXXXPXXXNAVILXSVXSXXNSXXYXXXRXXXXLXXXGXAPKXXXYXDRXGRPXXAXXXXXXXXXXXFXXXXXXXXXXXXXXXFXWLXAIXGLSXXFXWXXIXXSHXRFRXAXXXQGXSLXEXGXXXXXGXXGSXXXXXXXXXXXXXQFXVXXXPXXXXXXXGXXXXXXFFXXYLAXPXXXXXXXGYXXXXXXXXXXXXXXXXXXXXDLXXXXXXXXXXXXXXXXXXXXXXXXXXXXXXXXXXXXXXXXXXXXXXXXXXXXC

SEQ ID NO: 7267 - protein, 60 aa, Artificial sequence
  protein pattern
  Variant (3)..(3): Xaa in position 3 is any amino acid
  Variant (5)..(5): Xaa in position 5 is Ile, Leu or Val
  Variant (7)..(7): Xaa in position 7 is Ala, Ile or Val
  Variant (8)..(11): Xaa in position 8 to 11 is any amino acid
  Variant (12)..(12): Xaa in position 12 is Ile or Val
  Variant (13)..(13): Xaa in position 13 is Lys or Arg
  Variant (14)..(14): Xaa in position 14 is Ala, Gly, Ile or Val
  Variant (15)..(15): Xaa in position 15 is Ala, Ile, Leu or Val
  Variant (17)..(17): Xaa in position 17 is any amino acid
  Variant (18)..(18): Xaa in position 18 is Phe, Ile, Leu or Val
  Variant (19)..(19): Xaa in position 19 is Phe, Ile or Val
  Variant (24)..(24): Xaa in position 24 is Ile or Leu
  Variant (25)..(25): Xaa in position 25 is Ile, Leu or Met
  Variant (26)..(26): Xaa in position 26 is Ala or Ser
  Variant (27)..(28): Xaa in position 27 to 28 is any amino acid
  Variant (30)..(30): Xaa in position 30 is Met or Val
  Variant (31)..(31): Xaa in position 31 is Ala, Gly, Ser or Thr
  Variant (34)..(34): Xaa in position 34 is Ala, Cys, Ser or Thr
  Variant (35)..(35): Xaa in position 35 is any amino acid
  Variant (36)..(36): Xaa in position 36 is Phe or Tyr
  Variant (37)..(37): Xaa in position 37 is any amino acid
  Variant (38)..(38): Xaa in position 38 is Ala, Gly or Ser
  Variant (39)..(39): Xaa in position 39 is Ala, Gly, Pro or Ser
  Variant (41)..(41): Xaa in position 41 is any amino acid
  Variant (42)..(42): Xaa in position 42 is Phe, Ile, Leu or Met
  Variant (43)..(43): Xaa in position 43 is any amino acid
  Variant (44)..(44): Xaa in position 44 is Ala, Gly, Ser or Thr
  Variant (45)..(45): Xaa in position 45 is Leu or Met
  Variant (46)..(46): Xaa in position 46 is Ala or Ser
  Variant (47)..(50): Xaa in position 47 to 50 is any amino acid
  Variant (51)..(51): Xaa in position 51 is Ala, Gly, Ile or Leu
  Variant (53)..(54): Xaa in position 53 to 54 is any amino acid
  Variant (55)..(55): Xaa in position 55 is Phe or Leu
  Variant (56)..(56): Xaa in position 56 is any amino acid
  Variant (58)..(58): Xaa in position 58 is any amino acid
SPXVXAXXXXXXXXXPXXXNAVIXXXXXSXXNSXXXXXXRXXXXXXXXXXXPXXXXYXDR

SEQ ID NO: 7268 - protein, 44 aa, Artificial sequence
  protein pattern
  Variant (2)..(3): Xaa in position 2 to 3 is any amino acid
  Variant (5)..(5): Xaa in position 5 is any amino acid
  Variant (7)..(7): Xaa in position 7 is Ile or Leu
  Variant (8)..(8): Xaa in position 8 is Ala or Ser
  Variant (9)..(9): Xaa in position 9 is Gly or Ser
  Variant (10)..(10): Xaa in position 10 is Ile or Leu
  Variant (11)..(11): Xaa in position 11 is Ala or Ser
  Variant (12)..(12): Xaa in position 12 is Glu, Asn, Gln, Ser or Thr
  Variant (13)..(13): Xaa in position 13 is any amino acid
  Variant (14)..(14): Xaa in position 14 is Phe or Ile
  Variant (15)..(15): Xaa in position 15 is any amino acid
  Variant (16)..(16): Xaa in position 16 is Trp or Tyr
  Variant (17)..(17): Xaa in position 17 is any amino acid
  Variant (18)..(18): Xaa in position 18 is Ala, Gly or Ser
  Variant (19)..(19): Xaa in position 19 is Ile or Met
  Variant (20)..(20): Xaa in position 20 is any amino acid
  Variant (21)..(21): Xaa in position 21 is Phe, Leu or Val
  Variant (22)..(22): Xaa in position 22 is Cys or Ser
  Variant (24)..(24): Xaa in position 24 is Phe, Ile, Leu or Val
  Variant (25)..(25): Xaa in position 25 is any amino acid
  Variant (26)..(26): Xaa in position 26 is Phe or Met
  Variant (28)..(28): Xaa in position 28 is any amino acid
  Variant (29)..(29): Xaa in position 29 is Ala or Cys
  Variant (30)..(30): Xaa in position 30 is Phe or Met
  Variant (31)..(35): Xaa in position 31 to 35 is any amino acid
  Variant (37)..(38): Xaa in position 37 to 38 is any amino acid
  Variant (39)..(39): Xaa in position 39 is Glu, Gln or Thr
  Variant (40)..(40): Xaa in position 40 is Ile, Leu or Val
  Variant (41)..(41): Xaa in position 41 is Glu or Gly
  Variant (42)..(42): Xaa in position 42 is Phe or Tyr
  Variant (43)..(43): Xaa in position 43 is any amino acid
  Variant (44)..(44): Xaa in position 44 is Ala or Ser
FXXLXAXXXXXXXXXXXXXXXXHXXXRXXXXXXXXSXXXXXXXX

SEQ ID NO: 7269 - protein, 61 aa, Artificial sequence
  protein pattern
  Variant (2)..(4): Xaa in position 2 to 4 is any amino acid
  Variant (5)..(5): Xaa in position 5 is Ile, Leu or Met
  Variant (6)..(7): Xaa in position 6 to 7 is any amino acid
  Variant (10)..(10): Xaa in position 10 is Ile, Leu, Met or Val
  Variant (11)..(11): Xaa in position 11 is any amino acid
  Variant (12)..(12): Xaa in position 12 is Phe, Leu or Met
  Variant (13)..(13): Xaa in position 13 is Ile or Met
  Variant (14)..(14): Xaa in position 14 is Ala, Cys, Gly, Ser or Thr
  Variant (15)..(15): Xaa in position 15 is Ile, Leu or Val
  Variant (17)..(17): Xaa in position 17 is any or no amino acid
  Variant (19)..(19): Xaa in position 19 is any amino acid
  Variant (20)..(20): Xaa in position 20 is any or no amino acid
  Variant (22)..(22): Xaa in position 22 is Ser or Thr
  Variant (24)..(24): Xaa in position 24 is Leu or Val
  Variant (25)..(25): Xaa in position 25 is any amino acid
  Variant (26)..(26): Xaa in position 26 is Phe or Val
  Variant (27)..(27): Xaa in position 27 is Ala or Gly
  Variant (28)..(28): Xaa in position 28 is Asn or Ser
  Variant (29)..(29): Xaa in position 29 is Ala, Gly or Ser
  Variant (30)..(30): Xaa in position 30 is any amino acid
  Variant (31)..(31): Xaa in position 31 is Ala, Gly, Ser, Thr or Val
  Variant (32)..(32): Xaa in position 32 is Phe, Ile or Leu
  Variant (33)..(34): Xaa in position 33 to 34 is any amino acid
  Variant (35)..(35): Xaa in position 35 is Ala or Gly
  Variant (37)..(37): Xaa in position 37 is Ala or Pro
  Variant (38)..(38): Xaa in position 38 is Ala, Gly or Leu
  Variant (39)..(39): Xaa in position 39 is Ala, Gly or Ser
  Variant (40)..(40): Xaa in position 40 is Ala, Leu or Val
  Variant (41)..(41): Xaa in position 41 is Ile, Leu or Val
  Variant (42)..(42): Xaa in position 42 is Ile or Leu
  Variant (43)..(43): Xaa in position 43 is Ala, Asp, Gly or Asn
  Variant (44)..(44): Xaa in position 44 is Trp or Tyr
  Variant (45)..(45): Xaa in position 45 is any amino acid
  Variant (46)..(46): Xaa in position 46 is Ile, Leu or Met
  Variant (47)..(47): Xaa in position 47 is any amino acid
  Variant (48)..(48): Xaa in position 48 is Gly or Ser
  Variant (49)..(54): Xaa in position 49 to 54 is any amino acid
  Variant (55)..(55): Xaa in position 55 is Ile, Met or Val
  Variant (56)..(56): Xaa in position 56 is any amino acid
  Variant (57)..(57): Xaa in position 57 is Ala, Gly or Ser
  Variant (58)..(58): Xaa in position 58 is any amino acid
  Variant (61)..(61): Xaa in position 61 is Ile, Leu or Met
LXXXXXXRHXXXXXXGXGXXGXGXXXXXXXXXXXXGXXXXXXXXXXXXXXXXXXXXXXGEX

SEQ ID NO: 7270 - protein, 39 aa, Artificial sequence
  protein pattern
  Variant (2)..(2): Xaa in position 2 is any or no amino acid
  Variant (4)..(4): Xaa in position 4 is Ala, Ser or Val
  Variant (5)..(5): Xaa in position 5 is any amino acid
  Variant (6)..(6): Xaa in position 6 is Ala or Gly
  Variant (8)..(8): Xaa in position 8 is Ala or Gly
  Variant (10)..(10): Xaa in position 10 is any amino acid
  Variant (13)..(13): Xaa in position 13 is Phe, Ile, Leu, Met or Val
  Variant (14)..(14): Xaa in position 14 is Phe, Leu or Met
  Variant (15)..(15): Xaa in position 15 is Asn or Ser
  Variant (16)..(17): Xaa in position 16 to 17 is any amino acid
  Variant (19)..(19): Xaa in position 19 is Ile or Val
  Variant (20)..(23): Xaa in position 20 to 23 is any amino acid
  Variant (26)..(26): Xaa in position 26 is any or no amino acid
  Variant (28)..(28): Xaa in position 28 is Ile or Leu
  Variant (29)..(30): Xaa in position 29 to 30 is any amino acid
  Variant (31)..(31): Xaa in position 31 is Ala, Ile or Val
  Variant (32)..(32): Xaa in position 32 is Ile or Val
  Variant (33)..(33): Xaa in position 33 is any amino acid
  Variant (34)..(34): Xaa in position 34 is Ala, Cys, Asp, Asn, Thr or Val
  Variant (35)..(35): Xaa in position 35 is Ala, Cys or Gly
  Variant (37)..(37): Xaa in position 37 is any or no amino acid
  Variant (39)..(39): Xaa in position 39 is Ala, Asp, Gly, Asn, Thr or Val
FXGXXXYXEXEFXXXXXKXXXXXGFXIXXXXXXXXGXGX

SEQ ID NO: 7271 - protein, 39 aa, Artificial sequence
  protein pattern
  Variant (3)..(3): Xaa in position 3 is any amino acid
  Variant (4)..(4): Xaa in position 4 is Glu, Lys or Arg
  Variant (5)..(5): Xaa in position 5 is Ala, Asn, Ser or Thr
  Variant (6)..(6): Xaa in position 6 is any amino acid
  Variant (8)..(8): Xaa in position 8 is any amino acid
  Variant (10)..(10): Xaa in position 10 is any amino acid
  Variant (12)..(15): Xaa in position 12 to 15 is any or no amino acid
  Variant (17)..(17): Xaa in position 17 is Ile or Val
  Variant (18)..(18): Xaa in position 18 is Ala, Ile, Leu or Val
  Variant (19)..(19): Xaa in position 19 is any amino acid
  Variant (20)..(20): Xaa in position 20 is Phe, Ile, Leu or Val
  Variant (21)..(21): Xaa in position 21 is Phe or Tyr
  Variant (22)..(22): Xaa in position 22 is Ile, Leu, Met or Val
  Variant (23)..(23): Xaa in position 23 is any amino acid
  Variant (24)..(24): Xaa in position 24 is Ala, Ser or Thr
  Variant (25)..(26): Xaa in position 25 to 26 is any amino acid
  Variant (27)..(27): Xaa in position 27 is Ile or Leu
  Variant (28)..(28): Xaa in position 28 is Ile, Leu or Val
  Variant (29)..(29): Xaa in position 29 is Cys or Gly
  Variant (30)..(30): Xaa in position 30 is Phe or Leu
  Variant (31)..(31): Xaa in position 31 is any amino acid
  Variant (32)..(32): Xaa in position 32 is Ile or Val
  Variant (33)..(34): Xaa in position 33 to 34 is any amino acid
  Variant (35)..(35): Xaa in position 35 is Asp or Asn
  Variant (36)..(36): Xaa in position 36 is Asp, Asn or Ser
  Variant (37)..(37): Xaa in position 37 is any amino acid
  Variant (38)..(38): Xaa in position 38 is Glu, Asn, Gln or Arg
NPXXXXPXAXKXXXXRXXXXXXXXXXXXXXXXXXXXXXL

SEQ ID NO: 7272 - protein, 24 aa, Artificial sequence
  protein pattern
  Variant (3)..(3): Xaa in position 3 is any amino acid
  Variant (4)..(4): Xaa in position 4 is any or no amino acid
  Variant (8)..(8): Xaa in position 8 is any amino acid
  Variant (9)..(9): Xaa in position 9 is Cys or Pro
  Variant (10)..(10): Xaa in position 10 is Ile, Leu or Val
  Variant (11)..(11): Xaa in position 11 is any amino acid
  Variant (12)..(12): Xaa in position 12 is Ile or Leu
  Variant (13)..(14): Xaa in position 13 to 14 is any amino acid
  Variant (15)..(15): Xaa in position 15 is Phe or Tyr
  Variant (16)..(16): Xaa in position 16 is Phe, Ile, Leu or Val
  Variant (18)..(18): Xaa in position 18 is His or Tyr
  Variant (19)..(22): Xaa in position 19 to 22 is any amino acid
  Variant (23)..(23): Xaa in position 23 is Lys or Arg
  Variant (24)..(24): Xaa in position 24 is Asp, Glu, Ser or Thr
FFXXYLAXXXXXXXXXGXXXXXXX

SEQ ID NO: 7273 - protein, 27 aa, Artificial sequence
  protein pattern
  Variant (3)..(3): Xaa in position 3 is Gly or Asn
  Variant (4)..(4): Xaa in position 4 is Phe, Ile, Leu or Val
  Variant (5)..(7): Xaa in position 5 to 7 is any amino acid
  Variant (8)..(8): Xaa in position 8 is Phe, Leu or Met
  Variant (9)..(9): Xaa in position 9 is Cys, Thr or Val
  Variant (10)..(10): Xaa in position 10 is any amino acid
  Variant (11)..(11): Xaa in position 11 is Ala, Gly or Ser
  Variant (12)..(12): Xaa in position 12 is any amino acid
  Variant (14)..(14): Xaa in position 14 is Ala or Ser
  Variant (15)..(15): Xaa in position 15 is Phe or Tyr
  Variant (16)..(16): Xaa in position 16 is Ala, Gly or Ser
  Variant (17)..(17): Xaa in position 17 is Ala or Gly
  Variant (18)..(18): Xaa in position 18 is any amino acid
  Variant (20)..(20): Xaa in position 20 is any amino acid
  Variant (21)..(21): Xaa in position 21 is Phe, Ile, Leu, Met or Val
  Variant (22)..(22): Xaa in position 22 is any amino acid
  Variant (23)..(23): Xaa in position 23 is Ile, Leu or Val
  Variant (24)..(24): Xaa in position 24 is Ala, Ser or Thr
  Variant (25)..(25): Xaa in position 25 is any amino acid
  Variant (26)..(26): Xaa in position 26 is Ala, Asn, Gln or Ser
FKXXXXXXXXXXFXXXXXEXXXXXXXE

SEQ ID NO: 7274 - DNA, 1440 bp, Saccharomyces cerevisiae
  CDS (1)..(1440)
atgttcttttcaaaagttatgcttactcggcgtattttggtgaggggtttggcaacagccaaatcttcagctccaaagttaacagatgtattaatcgtaggtgggggtcctgcaggtttgactttagctgcatcgattaagaattctccgcaattaaaagatctaaagacaactttagtcgatatggtggacttaaaagataaattatcggacttttataattcacccccagattattttacgaacaggattgtcagtgttacgcctagatctattcattttcttgagaataacgctggggcaactttgatgcatgacaggattcaaagttatgacggactctatgtcacggacggttgttctaaggctactttggatctggcaagggactccatgctttgtatgattgaaattataaatatacaggcctccttatacaacagaatttctcagtacgattcaaagaaggactccattgatattattgataatacaaaagttgtcaatattaaacacagcgaccctaatgatccattgtcctggcctttagtcactctttccaatggtgaagtatacaagacgagattgctagtgggtgcagacgggttcaattctcctaccagaagattttcccagatcccatctaggggctggatgtataatgcctatggtgttgtggccagcatgaagttagagtatcctccctttaaactaaggggctggcagaggttcttacccactggtccaattgcacacttacccatgcctgaaaataatgctactttagtctggagttcatctgaacgtttatcgaggcttttgttgtcattacctccagaatcattcactgcacttatcaatgctgcttttgtcttggaagacgcagacatgaactactattaccgtacattggaagatggctctatggacaccgataaattgatagaagatattaaattcagaactgaggaaatatacgccacgttgaaggacgagtcggatattgatgaaatttacccaccaagagttgttagtataatagataagacaagagcacgttttcccttaaaattaacacatgcagatcgttattgcactgatagagttgcccttgttggggacgcagcacatacgacacatcctctcgctggacaggggttaaacatggggcaaacagacgttcatggtttagtatacgctttagaaaaggcaatggaaagaggtttagacattggctcttcattgagcttagaacccttttgggcagaaagatatccgtcgaacaacgttctattaggaatggcggataaattatttaaattatatcacactaattttcctcctgtggtagccctaagaacttttggtttgaatctgacgaataagatcggtccagttaagaatatgatcattgacacattaggaggaaatgagaaatga

SEQ ID NO: 7275 - protein, 479 aa, Saccharomyces cerevisiae
MFFSKVMLTRRILVRGLATAKSSAPKLTDVLIVGGGPAGLTLAASIKNSPQLKDLKTTLVDMVDLKDKLSDFYNSPPDYFTNRIVSVTPRSIHFLENNAGATLMHDRIQSYDGLYVTDGCSKATLDLARDSMLCMIEIINIQASLYNRISQYDSKKDSIDIIDNTKVVNIKHSDPNDPLSWPLVTLSNGEVYKTRLLVGADGFNSPTRRFSQIPSRGWMYNAYGVVASMKLEYPPFKLRGWQRFLPTGPIAHLPMPENNATLVWSSSERLSRLLLSLPPESFTALINAAFVLEDADMNYYYRTLEDGSMDTDKLIEDIKFRTEEIYATLKDESDIDEIYPPRVVSIIDKTRARFPLKLTHADRYCTDRVALVGDAAHTTHPLAGQGLNMGQTDVHGLVYALEKAMERGLDIGSSLSLEPFWAERYPSNNVLLGMADKLFKLYHTNFPPVVALRTFGLNLTNKIGPVKNMIIDTLGGNEK

SEQ ID NO: 7276 - DNA, 1687 bp, Glycine max
  CDS (49)..(1581)
gaagctatcacagctccagctcctggttccactttcgctcttcacaaaatgaaccgagtgataaagaagaccgtttcaaatatctgtgctctcaaggttccaagaaagtctttttgtagtactgagggtgtgaaagttgctggttgctctattccagaggtttccaatgaccatgagaagaagcaggctattagcaaagttattccacaatatgatattgctattgttggaggaggcatggttggcatggctttatcttttttcttggcaagtaatccaatgacaaagcagttgagtgttgcaattattgatagcaatccagctcttggaagtagcttgcacatcaagaaggaagatccccctgatccaagagtcagtacagtaactcctgcttctatttcttttctccaagatgctggtgcatggaaatatgttgagcaaaatagacgtgcttattttaatacaatgcaggtctgggattatactggtttggggtatgctagatatcatgcaagagatgtaaataaagactttctagggtgcgtggcagagaataaagtgctccataatgccttattgtcatgtgtaaaggattctgatttcaagacaacaatctatcctttgaggttaagttcaatgactttgaatacaagctctatgtctatggcggaggagaatccaacatccaaagaaccaccatctgctcaaggtcatggtgcagaactgcagcttagtgatggcagtagcatatatgcaaagttggtggttggcgctgatggaggaaaatcacatgttagggagttagcaggaatcaaaacaactggatggaattactcccagaatgcaataatctgcacggtggagcatacttatgaaaatgaatgtgcatggcaacgttttctaccaacaggtccaattgctcttttacccatgggtgataagtttagcaatattgtttggaccatgagcccaacagagtcaaataaccgcaagtcaattaccgaggaagaatttttaaaggatgtgaattatgctttagattatggacatggacctcatcctacatcaagcttatcaggaactcgagacgtgttctcttggtttaaaacggatgcaacactatcaactaatgaattctttgaaattcctccaaaagtaacaaggttggcatctgaaaggatggtgtttcctttgtctttaaggcatgccaattcctatgcattgaaacgtgtggttcttattggggatgcagcccacacagtccatcctcttgctggtcaaggagttaatttgggttttggagatgcattttctctttcaagaattattgcagaggggattgctttgggcactgatattggagaggtaaatatgttaaagaagtatgaagcagagagaaaaacagcaaatattatgatgatggcaatccttgatggcgtccaaaaagcctattctattgattttggaccttttaatattctgcgagctgcagccttccatggggcaaactatatatcaccactcaaaagaagtatcatttcctatgcttcaggggaacataaattacccattttcttctgaatacagaaatgtcatttaggttaagaagtggacctacaaaatgcagggtgagaatatcaactccctaacttatttaatatattcactttactttggagattaaaag

SEQ ID NO: 7277 - protein, 510 aa, Glycine max
MNRVIKKTVSNICALKVPRKSFCSTEGVKVAGCSIPEVSNDHEKKQAISKVIPQYDIAIVGGGMVGMALSFFLASNPMTKQLSVAIIDSNPALGSSLHIKKEDPPDPRVSTVTPASISFLQDAGAWKYVEQNRRAYFNTMQVWDYTGLGYARYHARDVNKDFLGCVAENKVLHNALLSCVKDSDFKTTIYPLRLSSMTLNTSSMSMAEENPTSKEPPSAQGHGAELQLSDGSSIYAKLVVGADGGKSHVRELAGIKTTGWNYSQNAIICTVEHTYENECAWQRFLPTGPIALLPMGDKFSNIVWTMSPTESNNRKSITEEEFLKDVNYALDYGHGPHPTSSLSGTRDVFSWFKTDATLSTNEFFEIPPKVTRLASERMVFPLSLRHANSYALKRVVLIGDAAHTVHPLAGQGVNLGFGDAFSLSRIIAEGIALGTDIGEVNMLKKYEAERKTANIMMMAILDGVQKAYSIDFGPFNILRAAAFHGANYISPLKRSIISYASGEHKLPIFF

SEQ ID NO: 7278 - DNA, 1524 bp, Arabidopsis thaliana
  CDS (1)..(1524)
atgtctaaggacagggtgctcgcaaggaatcttaggacaagtgtctgtggaacaaggattttgcagaggacttgttcgactgttgtgacacatgatgtttctacttcttgttccaatgagagcaatgcattaaataattccactgacgatggtccacaacatgacattgctattgttggtggtggaatggttggaatcgctttagctgcttcattggccagcaagccattgacaaagcacttgaatgtcgctattattgacaataatcctcttttggggagaagaaatatcatagagaaagggcatcaacctgatcccagagtcagtacagtcacacctgcaacaatatccttcctcaaagatattggtgcctggaaatacattgagcaacagcgacatgcgtattttgataagatgcaggtatgggactatacaggccttggatatacaagatacaatgctaatgatgtacatcaagatgttttggggtgtgtagtggagaataaagttcttcagagttctcagctatcttgtgtacaggaatcagatctccagaagactgtttatcccgcgaggttaaatgcgatggatatgctacctagctcttcgttgacaggtcttggtgaagtaccatccacaacagacttgttcatgcgaggacgccttgctaagctggagctaagcgatggaaatcgcgtctacgcaaaactggtggtaggcgctgatgggtctaagtcgcgagtaagggagttggctgggatcaaaacgactggatggaactactcacagaacgctataatttgtactgttgagcatacagccgaaaactacacagcatggcaacggtttttacccaatggcccaatcgcacttcttcccattggtgacaagtttagcaacatagtatggaccatggacccaaaagaggcatcagatcgaaaattgatgaacgaggatgacttcatcaaagctgtaaatgatgctctggattctggatatggtcctaatccagagactacaagttcacgggatagtctctcttggcttacaggagatgcgaccatatctgccaaagagaggtttgaaactcctcccaaggttgtgaagctttcttcagagagaatgatgttccctttgtctttaaggcacgcaaaagactatgtgtcaaaacgtgtggctcttgttggtgactcagctcatacagttcacccgttggctggtcaaggagtaaatctaggatttgcagatgcgtgtgctctctccaaagctatagcagagggcattgctcttggtactgatataggcgaggcgaatctgctcaaacgttatgaagcagagagaaaacctgcaaatatagcaatgatggcggttttagacggaatccagaagatgtactcgttggatttcggaccgctgaatgctctaagagcagctgcattccacggggctcactacatttcgccgcttaaaaagcgtatcatatcttatgcttcaggagagcaatctttgccgctattttcttga

SEQ ID NO: 7279 - protein, 507 aa, Arabidopsis thaliana
MSKDRVLARNLRTSVCGTRILQRTCSTVVTHDVSTSCSNESNALNNSTDDGPQHDIAIVGGGMVGIALAASLASKPLTKHLNVAIIDNNPLLGRRNIIEKGHQPDPRVSTVTPATISFLKDIGAWKYIEQQRHAYFDKMQVWDYTGLGYTRYNANDVHQDVLGCVVENKVLQSSQLSCVQESDLQKTVYPARLNAMDMLPSSSLTGLGEVPSTTDLFMRGRLAKLELSDGNRVYAKLVVGADGSKSRVRELAGIKTTGWNYSQNAIICTVEHTAENYTAWQRFLPNGPIALLPIGDKFSNIVWTMDPKEASDRKLMNEDDFIKAVNDALDSGYGPNPETTSSRDSLSWLTGDATISAKERFETPPKVVKLSSERMMFPLSLRHAKDYVSKRVALVGDSAHTVHPLAGQGVNLGFADACALSKAIAEGIALGTDIGEANLLKRYEAERKPANIAMMAVLDGIQKMYSLDFGPLNALRAAAFHGAHYISPLKKRIISYASGEQSLPLFS

SEQ ID NO: 7280 - DNA, 1518 bp, Arabidopsis thaliana
  CDS (1)..(1518)
atgaacagggtgctcgcaaggaatcttaggacaagtgtctgtggaacaaggattttgcagaggacttgttcgactgttgtgacacatgatgtttctacttcttgttccaatgagagcaatgcattaaataattccactgacgatggtccacaacatgacattgctattgttggtggtggaatggttggaatcgctttagctgcttcattggccagcaagccattgacaaagcacttgaatgtcgctattattgacaataatcctcttttggggagaagaaatatcatagagaaagggcatcaacctgatcccagagtcagtacagtcacacctgcaacaatatccttcctcaaagatattggtgcctggaaatacattgagcaacagcgacatgcgtattttgataagatgcaggtatgggactatacaggccttggatatacaagatacaatgctaatgatgtacatcaagatgttttggggtgtgtagtggagaataaagttcttcagagttctcagctatcttgtgtacaggaatcagatctccagaagactgtttatcccgcgaggttaaatgcgatggatatgctacctagctcttcgttgacaggtcttggtgaagtaccatccacaacagacttgttcatgcgaggacgccttgctaagctggagctaagcgatggaaatcgcgtctacgcaaaactggtggtaggcgctgatgggtctaagtcgcgagtaagggagttggctgggatcaaaacgactggatggaactactcacagaacgctataatttgtactgttgagcatacagccgaaaactacacagcatggcaacggtttttacccaatggcccaatcgcacttcttcccattggtgacaagtttagcaacatagtatggaccatggacccaaaagaggcatcagatcgaaaattgatgaacgaggatgacttcatcaaagctgtaaatgatgctctggattctggatatggtcctaatccagagactacaagttcacgggatagtctctcttggcttacaggagatgcgaccatatctgccaaagagaggtttgaaactcctcccaaggttgtgaagctttcttcagagagaatgatgttccctttgtctttaaggcacgcaaaagactatgtgtcaaaacgtgtggctcttgttggtgactcagctcatacagttcacccgttggctggtcaaggagtaaatctaggatttgcagatgcgtgtgctctctccaaagctatagcagagggcattgctcttggtactgatataggcgaggcgaatctgctcaaacgttatgaagcagagagaaaacctgcaaatatagcaatgatggcggttttagacggaatccagaagatgtactcgttggatttcggaccgctgaatgctctaagagcagctgcattccacggggctcactacatttcgccgcttaaaaagcgtatcatatcttatgcttcaggagagcaatctttgccgctattttcttga

SEQ ID NO: 7281 - protein, 505 aa, Arabidopsis thaliana
MNRVLARNLRTSVCGTRILQRTCSTVVTHDVSTSCSNESNALNNSTDDGPQHDIAIVGGGMVGIALAASLASKPLTKHLNVAIIDNNPLLGRRNIIEKGHQPDPRVSTVTPATISFLKDIGAWKYIEQQRHAYFDKMQVWDYTGLGYTRYNANDVHQDVLGCVVENKVLQSSQLSCVQESDLQKTVYPARLNAMDMLPSSSLTGLGEVPSTTDLFMRGRLAKLELSDGNRVYAKLVVGADGSKSRVRELAGIKTTGWNYSQNAIICTVEHTAENYTAWQRFLPNGPIALLPIGDKFSNIVWTMDPKEASDRKLMNEDDFIKAVNDALDSGYGPNPETTSSRDSLSWLTGDATISAKERFETPPKVVKLSSERMMFPLSLRHAKDYVSKRVALVGDSAHTVHPLAGQGVNLGFADACALSKAIAEGIALGTDIGEANLLKRYEAERKPANIAMMAVLDGIQKMYSLDFGPLNALRAAAFHGAHYISPLKKRIISYASGEQSLPLFS

SEQ ID NO: 7282 - DNA, 1218 bp, Pseudomonas aeruginosa PAO1
  CDS (1)..(1218): transl_table=11
atgcacgcggatctggtcatcgtcggcgccggcatggtcggtagcgccctggccctggccctggagggcagcggcctggaggtgctgctggtggacggcggctcgctcgacgtggcgccgttcaagccggaggcgccctacgagccgcgggtcagcgcgctgtccgaagccagccggcggattctccagcgcctgcatgcctgggacggcatcgtcgcgcgccgcgccgagccctatcgcgagatgcaggtgtgggatggctccggcaccgggcggatcggcttcagcgccgccagcgtgcacgccgaggtactcggccatatcgtcgagaaccgggtggtgcaggacgccctgctggaacgcctgcacgattccaccaccggcctgctggccaatgcgcgcctggaacagatgcgccactccggcgacgactggctgctgaccctggccgacggtcgccagctgcgtgcgccgctggtggtcgccgccgacggcgccaactcggcggtacgccgcctggccggctgcgccacccgcgaatgggattacctgcaccacgccatcgtcaccagcgtgcgctgcgagaacgcgcaccgcgcaaccgcctggcagcgcttcaccgacgacggtccgctggccttcctgcccctgccggaccgcggcgacgagcactggtgctcgatcgtctggtcgaccaccccggaacaggcagaacgcctgatggcgttggacgaggatggcttccgcgccgccctcggcgaagccttcgaacagcgcctgggcgccatcctgcatgccgaccggcgcctgtgcatcccgctgcgccagcggcacgccaagcgttacgtcgagccgggcctggcgctggtcggcgatgctgcgcacaccatccacccgctggccggacagggcgtgaacctgggcttcctcgatgcggcggtgctgtccgaggtcctgttgcacgccctggagcgcggcgaacggcttgccgacgaacgcgtgctgagtcgcttcgagcggcggcggatgccgcacaacctgggcatgatgacggcgatggaaggcttcgagcgcctgttccaggccgaccggttgccgctgcgctggctgcgcaacgccggcctgcgcctggtcgacggccatcacgaggcgaaggcgctgttcgtccgccaggcgcttggcctcagcggcgacctgccgatgctggcacgagtctga

SEQ ID NO: 7283 - protein, 405 aa, Pseudomonas aeruginosa PAO1
MHADLVIVGAGMVGSALALALEGSGLEVLLVDGGSLDVAPFKPEAPYEPRVSALSEASRRILQRLHAWDGIVARRAEPYREMQVWDGSGTGRIGFSAASVHAEVLGHIVENRVVQDALLERLHDSTTGLLANARLEQMRHSGDDWLLTLADGRQLRAPLVVAADGANSAVRRLAGCATREWDYLHHAIVTSVRCENAHRATAWQRFTDDGPLAFLPLPDRGDEHWCSIVWSTTPEQAERLMALDEDGFRAALGEAFEQRLGAILHADRRLCIPLRQRHAKRYVEPGLALVGDAAHTIHPLAGQGVNLGFLDAAVLSEVLLHALERGERLADERVLSRFERRRMPHNLGMMTAMEGFERLFQADRLPLRWLRNAGLRLVDGHHEAKALFVRQALGLSGDLPMLARV

SEQ ID NO: 7284 - DNA, 1176 bp, Escherichia coli O157:H7 EDL933
  CDS (1)..(1176): transl_table=11
  misc_feature (837)..(837): k is g or t
  misc_feature (991)..(991): y is t or c
atgacaaatcaaccaacggaaattgccattgtcggcggaggaatggtcggcggcgcactggcgctggggctggcacagcacggatttacggtaacggtgatcgagcacgcagaacctgcaccgtttgtcgctgatagccaaccggacgtgcggatctcggcgatcagcgcggcttcggtatcattgcttaaagggttaggggtctgggatgcagtacaggctatgcgttgccatccttaccgcagactggaaacgtgggagtgggaaacggcgcatgtggtatttgacgcagccgaattaaagttgccgttgcttggctatatggtagaaaacactgtcctgcaacaggcattgtggcaggcgctggaagcgcatccgaaagtaacgttacgtgtgccaacctcgctgattgcattacatcgagataatgatcttcaggagctggagctgaaaggcggtgaagtgattcgcgcgaagctggtgattggtgccgacggcgcaaattcgcaggtgcggcagatggcgggaattggcgttcatgcatggcagtatgcgcagtcgtgcatgttgattagcgtccagtgcgagaacgatcccggcgatagcacctggcagcaatttaccccggatggaccgcgcgcgtttctgccgctgtttgataactgggcatcgctggtgtggtacgactctccggcgcgcattcgccagttgcagaatatgaatatggcgcagttacaggtggaaatcgcgaagcatttcccgtcgcgtctgggttacgttacaccgcttgccgctggtgcgtttccgctgacacgccgccatgcgttgcagtatgtkcagccggggcttgcgctggtgggtgatgccgcgcacaccatccatccgctggcggggcagggggtgaatcttggttatcgtgatgtcgatgccctgattgatgttctggtgaatgcccgcagctacggcgaagcgtgggccagttatcctgtcytcaagcgttaccagatgcggcgcatggcggataacttcattatgcagagcggtatggatctgttttatgccggattcagtaataatctgccgccgctgcgttttgtgcgtaatcttggtttgatggcggcggagcgtgctggcgtgttgaaacgtcaggcgctgaaatatgcgttagggttgtag

SEQ ID NO: 7285 - protein, 391 aa, Escherichia coli O157:H7 EDL933
  misc_feature (331)..(331): The Xaa at location 331 stands for Leu, or Phe.
MTNQPTEIAIVGGGMVGGALALGLAQHGFTVTVIEHAEPAPFVADSQPDVRISAISAASVSLLKGLGVWDAVQAMRCHPYRRLETWEWETAHVVFDAAELKLPLLGYMVENTVLQQALWQALEAHPKVTLRVPTSLIALHRDNDLQELELKGGEVIRAKLVIGADGANSQVRQMAGIGVHAWQYAQSCMLISVQCENDPGDSTWQQFTPDGPRAFLPLFDNWASLVWYDSPARIRQLQNMNMAQLQVEIAKHFPSRLGYVTPLAAGAFPLTRRHALQYVQPGLALVGDAAHTIHPLAGQGVNLGYRDVDALIDVLVNARSYGEAWASYPVXKRYQMRRMADNFIMQSGMDLFYAGFSNNLPPLRFVRNLGLMAAERAGVLKRQALKYALGL

SEQ ID NO: 7286 - DNA, 1230 bp, Caulobacter crescentus CB15
  CDS (1)..(1230): transl_table=11
gtgatcatcgccggcgccggcatggccggctccaccctggccctggctctggcctcgggcggcctgaggccgctgctggtcgatcctgcgcccttcgaggcccagctggccccgaccttcgatggtcgcagctcggcgatcgcctattcctcgttccgtcagtggcgggcgatcggcgcgggccaggcgctggagccgcacgcccagcgcatcgagcagatcctggtcaccgacggccgcacgcccggcgcggcggcccgcaagccgctgccggccttcctgcgcttcgactccagtgagatctccgggcgcatcgagggcgagccgctgggctatctggtcgagaaccgccagatccgcgccgcgctctccaaggccgtcatcgacaagaacatcccggtgattgcgccgatggccgccaaggccttgtcggtcgagcccggcgcggcaaagctgaccctgtcggacggccgagtgctgaccgcgcctctggccgtcagcgccgaggggcggggctcggtgctacgccgcgcagccggtatcggcgacatcggctggagctatggccagagcggcgtggtctgcaccgtcaggctggagcgcccgcacgagggcgtggcccacgaatacttcctgcccagcggccccttcgccatcctgccgctgaccgacaatcgcgcgagcctcgtgtggaccgagagcaccgcgcgcggcgaggccttgcgccaggcgggccccgaggccttccacgcccacctgatgcgccggttcggcgacttcctgggcgcggtgtcgatcgaggggccgatcttcgtctatccgctgtcgctgtccctggccgagcgcatggtcgccccgcgtctggccttgattggtgacgccgctcacggcgtgcacccgatcgcgggtcagggcctgaatctgggcctcaaggacgccgccgccctggccgaagtgctggtcgaggcggtgcgccacggcgaagacatcggggccgaggccgtgctggagcgttacgcccgctggcggcggttcgacaccgtgaccaacgccctggccttcgacgcctttgtgcggatcttctccaacgacaacccgctgctgcggctggcgcggggcgcgggtctggcggtggtcaaccagatcgccccggcgcgccgcttcttcatgcacgaggccggcggcggggtgggtgatctgccgaagcttttgcgggggcaagcgctgtaa

SEQ ID NO: 7287 - protein, 409 aa, Caulobacter crescentus CB15
MIIAGAGMAGSTLALALASGGLRPLLVDPAPFEAQLAPTFDGRSSAIAYSSFRQWRAIGAGQALEPHAQRIEQILVTDGRTPGAAARKPLPAFLRFDSSEISGRIEGEPLGYLVENRQIRAALSKAVIDKNIPVIAPMAAKALSVEPGAAKLTLSDGRVLTAPLAVSAEGRGSVLRRAAGIGDIGWSYGQSGVVCTVRLERPHEGVAHEYFLPSGPFAILPLTDNRASLVWTESTARGEALRQAGPEAFHAHLMRRFGDFLGAVSIEGPIFVYPLSLSLAERMVAPRLALIGDAAHGVHPIAGQGLNLGLKDAAALAEVLVEAVRHGEDIGAEAVLERYARWRRFDTVTNALAFDAFVRIFSNDNPLLRLARGAGLAVVNQIAPARRFFMHEAGGGVGDLPKLLRGQAL

SEQ ID NO: 7288 - DNA, 1260 bp, Nostoc sp. PCC 7120
  CDS (1)..(1260): transl_table=11
atggcgctaacgcagcttactcaaactatttctcctcaaccgacaccgccagaactgcgaaaatacgactatgatttagtcatcgtcggcggtggaattgttgggttaactctagcttcagcattaaaagattctggcttgaatatactgctaattgaagccaaagttgcatcagcagcagtagctaaaggtcaagcctacgcagttcatctactatcagccctaatttaccaaggaattggtatttgggataaaattctgcctcagattgccaagtaccgccaagtccgtctttctgatgctgattatcctggtgtggtggagtttgaaagcacagatttagggacaccagaattaggttatgtagcggaacatcaagcgttactggaacctctacaggagtttgtgcagaattgcccaaatgtgacttatctttgtccggctgaggtggtgagtaccaattaccagccaaatgaagtagtcatcgctgttaaaattgccgatcaattaaacacaattcgtagcaaattactggtagccgcagatggatcgcgatcgcctattcgtcaggcggcggggattaaaactcatggctggaagtattggcaatcttgcattgtggctttcgttaagccagagaaaccccataacgatacagcttacgaaagattttggcctagtggcccctttgcgattttacctctacctgagaaccgttgccgcatcgtttggacggctccccacgatgaagcaaaagccctttgtgccttaaatgacgaagaatttttacgagaacttagccaacgctttgggcagcaaatgggtaagttggaattattaggcgatcgcttcgtttttcaagtacaactaatgcaaagcgatcgttatgtccttccccgtttagctttagttggcgatgcggcacataattgtcatcctgtgggtggacaaggattaaacttgggtattcgagatgtcgccgctttagcccaagtcattcaaaaagcacatcaagctggtgaagatattggtaatattcgggtcttgaaacgttacgaaagctggcgacaaaaagagaacctagccattttagggttcactgatatgttagaccggatgttctctaaccaattccctccgttggtgtttcttcgtcgcttgggtttatggtttttacgcagtgtccctgtgctgaaaacatttatgctcaagttgatgattgggttgaagggaaaaactccagaattggctaaacgttga

SEQ ID NO: 7289 - protein, 419 aa, Nostoc sp. PCC 7120
MALTQLTQTISPQPTPPELRKYDYDLVIVGGGIVGLTLASALKDSGLNILLIEAKVASAAVAKGQAYAVHLLSALIYQGIGIWDKILPQIAKYRQVRLSDADYPGVVEFESTDLGTPELGYVAEHQALLEPLQEFVQNCPNVTYLCPAEVVSTNYQPNEVVIAVKIADQLNTIRSKLLVAADGSRSPIRQAAGIKTHGWKYWQSCIVAFVKPEKPHNDTAYERFWPSGPFAILPLPENRCRIVWTAPHDEAKALCALNDEEFLRELSQRFGQQMGKLELLGDRFVFQVQLMQSDRYVLPRLALVGDAAHNCHPVGGQGLNLGIRDVAALAQVIQKAHQAGEDIGNIRVLKRYESWRQKENLAILGFTDMLDRMFSNQFPPLVFLRRLGLWFLRSVPVLKTFMLKLMIGLKGKTPELAKR

SEQ ID NO: 7290 - DNA, 1290 bp, Brucella melitensis 16M
  CDS (1)..(1290): transl_table=11
gtgccaaaacactgcgcgaaagacggattctggaaaggaacgacaatggctggccagaaaaatacggacgccccacgcaataacgatgtggtgattgcaggcggcggctatgtcggccttgtcacggcggttgcgatcaagtcagccgcgccccacctttccgtcaccgtgatcgatggcgcgcctgcgggcgcgtggaagaacgacccgcgcgcctcctccattgccgccgccgcctcgcggatgctctacaagcttggctgctggcaggaaatcgttcccgaagcccagcccatcaccgaaatggtcattaccgattcgcggacatccgatcccgtgcgccccgtcttcctcaccttcgagggggaggtggaaccgggcgaacccttcgcccatatggtcgagaaccgcgtgctcaacaccgcattgcacaacaaggcggatgcgctcggcatcaccttccttgaagcggtgagcgtggagaattttgaaacccggccggaaggcgtaaccgtcacgctggccaatggcgacaggctggaaacccgccttttgatcgccgccgatggcgctcgctcgcgactgcgcgatctggcaggcatcaagaccgtcaattgggactatggccaatccggcattgtctgcaatgtggcgcatgagcgcccgcatggaggccgcgccgacgagcattttctgcctgccggcccctttgcgatccttccgttgaagggcaatcgctgctcgctcgtctggacggaacgcacggcagacgccgaacggcttatccgcgaggatgatttcgttttcgaggccgaactggaacagcgttttggccaccgcctcggcgccctgcatgtcgaaggcccacgccgcgccttcccgcttggcctgacactggcgcgcgaattcgtaaagccccgctttgcgcttgtgggcgacgccgcccaccgcatccacccgatcgccggtcagggcctcaatctcggcttccgcgatgcggcggcgattgccgaagtggtggtcgaaacggaccgcctcggcctcgatatcggttcctttgcagcccttgagcgctatcaggcctggcgtcgcttcgatacggtgcagatgggcgtcaccaccgacattctgaccaagcttttttccaacgacaatccggcggtgcgttccatccgcgacatcggcctcggccttgttgatcgcgttccaagcctcaaatccttcttcatcaaacaggcggccggtctttccggcgatacgccgcgccttttgaaaggcgagcctatctga

SEQ ID NO: 7291 - protein, 429 aa, Brucella melitensis 16M
MPKHCAKDGFWKGTTMAGQKNTDAPRNNDVVIAGGGYVGLVTAVAIKSAAPHLSVTVIDGAPAGAWKNDPRASSIAAAASRMLYKLGCWQEIVPEAQPITEMVITDSRTSDPVRPVFLTFEGEVEPGEPFAHMVENRVLNTALHNKADALGITFLEAVSVENFETRPEGVTVTLANGDRLETRLLIAADGARSRLRDLAGIKTVNWDYGQSGIVCNVAHERPHGGRADEHFLPAGPFAILPLKGNRCSLVWTERTADAERLIREDDFVFEAELEQRFGHRLGALHVEGPRRAFPLGLTLAREFVKPRFALVGDAAHRIHPIAGQGLNLGFRDAAAIAEVVVETDRLGLDIGSFAALERYQAWRRFDTVQMGVTTDILTKLFSNDNPAVRSIRDIGLGLVDRVPSLKSFFIKQAAGLSGDTPRLLKGEPI

SEQ ID NO: 7292 - DNA, 1275 bp, Thermosynechococcus elongatus BP-1
  CDS (1)..(1275): transl_table=11
gtgatgacatcggcctttgcaccctcagaacagtcgctggttgcttctcctcaagatctgcccgcggtggatgtggcgattgtcggtgccgggattgtgggtctcagtctggcctgtgcgctacgcaacagtgggctagcgatcgccctcattgaggcaactccctacaggcgggaaaacaccaagggtcaagcctatgccctgcaccaagtgtctcgttacttctttgaggaaatcggggtgtgggataagcttatgccccatgtgcagccctttgaggtggtgcaactctccgatgaacggtttcccttgacagttcacttttccccagcagatctgggcacggaagcccttggttatgtgggtgagcactcagcgatcgccgagaccctgcagagcgttttacagtctgccggcaatgtcacgttctactgcccgtggcgggtagtgaccaacgaagtccacggcgatcgcgctcagttgaccctcatttctggtgaccctggggaacccaaggtggctcacttggcagcccgtttagtggtcgccgcagatggtggcaagtctcccctacggcagcagatggggattgaacctaagggatggcaatatcctcagtcctgtgtggttgccaccctcgatgttgcccatccccaacctgtgattgcctacgagcgcttttggccgacaggaccaatgggcgtgctacccctaccgcggaatcgctatcgagtggtttggacactgccccacccagaggcggaagccgttgctgccctcgacgatcgcagctttttggcaacacttcagccctatcttgatccccagatggcggagattacggctgtgggcgatcgctttgtctttccagcccaattcatgcaagttaactcctacgcggcggatcgctttgtggttattggcgatgcagcccaccgctgccatcccgtggggggacaaggactcaatttgggactacgggatgtatggaatctggcacagcagattttggctagcccccttgaggaaattggcgatcgccgacacctgatgcactttcaccgccaacgctggtggcaaaatgtcttgaccctggcctttaccgacttcctgaaccgtctgttttccaatacagggtggcctttggtggcagtacgccgctgcgggctggggctgttgtgcctcttgccgccgttgaagcgtttgctattgcgctttatggccggtcttctactgcccctaccaggcgatcgtgaattccccagaggccgttaa

SEQ ID NO: 7293 - protein, 424 aa, Thermosynechococcus elongatus BP-1
MMTSAFAPSEQSLVASPQDLPAVDVAIVGAGIVGLSLACALRNSGLAIALIEATPYRRENTKGQAYALHQVSRYFFEEIGVWDKLMPHVQPFEVVQLSDERFPLTVHFSPADLGTEALGYVGEHSAIAETLQSVLQSAGNVTFYCPWRVVTNEVHGDRAQLTLISGDPGEPKVAHLAARLVVAADGGKSPLRQQMGIEPKGWQYPQSCVVATLDVAHPQPVIAYERFWPTGPMGVLPLPRNRYRVVWTLPHPEAEAVAALDDRSFLATLQPYLDPQMAEITAVGDRFVFPAQFMQVNSYAADRFVVIGDAAHRCHPVGGQGLNLGLRDVWNLAQQILASPLEEIGDRRHLMHFHRQRWWQNVLTLAFTDFLNRLFSNTGWPLVAVRRCGLGLLCLLPPLKRLLLRFMAGLLLPLPGDREFPRGR

SEQ ID NO: 7294 - DNA, 1176 bp, Shigella flexneri 2a str. 301
  CDS (1)..(1176): transl_table=11
atgacaaatcaaccaacggaaattgccattgtcggcggaggaatggtcggcggcgcactggcgctggggctggcacagcacggattttcggtaacggtgatcgagcacgcagaacctgcaccgtttgtcgctgacagccaaccggacgtgcggatctcggcgatcagcgcggcttcggtatcattgcttaaagggttaggggtctgggatgcagtacaggctatgcgttgccatccttaccgcagactggaaacctgggagtgggaaacggcacatgtggtatttgacgcagccgaattaaagttgccgttgcttggctacatggtggaaaacacagtcctgcaacaggcgttgtggcaggcgctggaagcgcatccgaaagtaacgttacgtgtgccaacctcgctgattgcattacatcgagataatgatcttcaggagctggaactgaagggcggtgaaacgatccgcgcgaaactggtgattggtgccgacggcgcaaattctcaggtgcggcagatggcgggaattggcgttcatgcctggcagtatgcgcagtcgtgcatgttgattagcgtacagtgtgagaacgatcccggcgacagcacctggcagcaatttaccccggacggaccgcgtgcgtttctgccgttgtttgataactgggcatcgctggtgtggtatgactctccgacgcgtattcgccagttgcagaatatgaatatggcgcaactccaggcggaaatcgcgaagcatttcccgtcgcgtctgggttacgttacaccgcttgccgctggtgcgtttccgctgacgcgccgacatgcgttgcagtatgtgcagccggggcttgcgctggtgggcgatgccgcgcataccatccatccgctggcggggcagggggtgaatcttggttatcgtgatgtcgatgccctgattgatgttctggtgaatgcccgcagctacggtgaagcgtgggccagttatcctgtcctcaagcgttaccagatgcggcgcatggcggataacttcattatgcaaagtggtatggatctgttttatgccggattcagtaataatctgccgccgctgcgttttgtgcgtaatctcgggttaatggcggcagagcgtgctggcgtgttgaaacgtcaggcgctgaaatatgcgttagggttgtag

SEQ ID NO: 7295 - protein, 391 aa, Shigella flexneri 2a str. 301
MTNQPTEIAIVGGGMVGGALALGLAQHGFSVTVIEHAEPAPFVADSQPDVRISAISAASVSLLKGLGVWDAVQAMRCHPYRRLETWEWETAHVVFDAAELKLPLLGYMVENTVLQQALWQALEAHPKVTLRVPTSLIALHRDNDLQELELKGGETIRAKLVIGADGANSQVRQMAGIGVHAWQYAQSCMLISVQCENDPGDSTWQQFTPDGPRAFLPLFDNWASLVWYDSPTRIRQLQNMNMAQLQAEIAKHFPSRLGYVTPLAAGAFPLTRRHALQYVQPGLALVGDAAHTIHPLAGQGVNLGYRDVDALIDVLVNARSYGEAWASYPVLKRYQMRRMADNFIMQSGMDLFYAGFSNNLPPLRFVRNLGLMAAERAGVLKRQALKYALGL

SEQ ID NO: 7296 - DNA, 1224 bp, Shewanella oneidensis MR-1
  CDS (1)..(1224): transl_table=11
atgttaagttcacaagcctatgacattgccattgtgggtggcggcatggtgggactcgccaccgcgataggattggcgcaggctgatcttaatgttgtcgttatcgatgcgggccacacagaggccgtgagcggcgagccaaggcttagggtcagcgcgatcaacaaggcgagccagcgtttgctggagcatcttggcgcttggcactatgtcgatgccagccgcgcgacgccctatcaaaaaatggcggtatgggataaagacggctttggcaaaatcgccttcgatgccagcagcatcagtgaacccagtcttggcgcgattatcgaaaacgacgccatcagctatgccctcgccaagcgtgccagtgaatttgacaatatcacccatatcgaaaaccaacgcttagagcgcattgcctttggtgagcgtgaagcttggttgaccctagctaatagtgccgatgctgaaatagaaagtgtgagcgccgcactcgtgattgccgccgatggcgccaactcttgggtgcgtgagcaatgtaagatcccgttaaccttttgggattatggccaccatgcgatcgtggcgactattcgcagcgagatgccgcaccttgccactgcccgccaagtctttttgcaggacggcccgctggccttcttacctttatatgaagacaacctctgctccatcgtctggtcggtgccgcccgagcgcgccactgaattactggcaatggacaaagtgcaatttgagcgcaatctcaccgccgccttcgatggtcgcctcggcatttgcaagctcgagagcgagcgccaagccttcccgctgcggatgcgctacgcccgtcattttgcccgccaccgtttagtgctcgcgggggacgctgcccacaccattcatccattagccggccaaggggtaaaccttggcttcctcgatgccgccagcattatcgaagttatcagcgaattgcagcaagcgggtaaggatattggcgattatgccgagctgcgcgcgttagagcgttggcgcaaggccgatgcgatggagatgattgcggcgatggaaggctttaagcgcctgttcgagggttcaaacccagttaaaaaggcgattcgcgatctgggactcaaccttgtcgataatgtcgctgggctgaaaacagtgttcatgcaacaggccatgggtaataagtcgtcgctgcccaagttatgtcgctag

SEQ ID NO: 7297 - protein, 407 aa, Shewanella oneidensis MR-1
MLSSQAYDIAIVGGGMVGLATAIGLAQADLNVVVIDAGHTEAVSGEPRLRVSAINKASQRLLEHLGAWHYVDASRATPYQKMAVWDKDGFGKIAFDASSISEPSLGAIIENDAISYALAKRASEFDNITHIENQRLERIAFGEREAWLTLANSADAEIESVSAALVIAADGANSWVREQCKIPLTFWDYGHHAIVATIRSEMPHLATARQVFLQDGPLAFLPLYEDNLCSIVWSVPPERATELLAMDKVQFERNLTAAFDGRLGICKLESERQAFPLRMRYARHFARHRLVLAGDAAHTIHPLAGQGVNLGFLDAASIIEVISELQQAGKDIGDYAELRALERWRKADAMEMIAAMEGFKRLFEGSNPVKKAIRDLGLNLVDNVAGLKTVFMQQAMGNKSSLPKLCR

SEQ ID NO: 7298 - DNA, 1176 bp, Escherichia coli CFT073
  CDS (1)..(1176): transl_table=11
atgacaaatcaaccaacggaaattgccattgtcggcggaggaatggtcggcggcgcactggcgctgggactggcacagcacgggtttacggtaacggttattgaacatgcccagcctgcgccgtttgttgcggacagccagccggacgtgcggatctcggcgatcagcgcggcttcggtatcattgcttaaaggggtaggggcctgggatgcagtacaggctatgcgttgccatccttaccgcagactggaaacgtgggagtgggaaacggcgcatgtcgtgtttgacgccgctgaacttaagctaccgttgcttggctacatggtggaaaacactgtcctgcaacaggcgttgtggcaggcgctggaagcgcatccgaaagtaacgttacgtgtgccaggctcgctgattgcactgcatcgccataatgatcttcaggagctggaactgaagggcggtgaaacgatcctcgcgaagctggtgattggtgccgacggcgcaaattcgcaggtgcgacagatggcgggaattggcgttcatgcctggcagtatgcgcagtcgtgtatgttaattagcgtacagtgtgagaacgatcccggcgacagcacctggcagcaatttaccccggacggaccgcgtgcgtttctgccgttgtttgataactgggcatcgctggtgtggtatgactctccggcgcgcattcgccagttgcagaatatgaatatggcgcagctacaggcggaaatcgtgaagcatttcccgtcgcgtcttgggtatgtaataccgcttgccgctggcgcgtttccgctgatacgtcgccatgcgttgcagtatgtgcagccggggcttgcgctggtgggcgatgccgcgcataccatccatccgctggcggggcagggggtgaatcttggttatcgtgatgtcgatgccctgattgacgttctggtgaacgcccgcagctacggcgaagcgtgggccagttatcctgtgctcaagcgttaccagatgcggcgtatggcggataacttcatgatgcaaagtggtatggatctgttttatgccggattcagcaataatctgccaccgctgcgttttgtgcgtaatcttggtttgatggcggcggagcgtgctggcgtgttgaaacgtcaggcgctgaaatatgcgttagggttgtag

SEQ ID NO: 7299 - protein, 391 aa, Escherichia coli CFT073
MTNQPTEIAIVGGGMVGGALALGLAQHGFTVTVIEHAQPAPFVADSQPDVRISAISAASVSLLKGVGAWDAVQAMRCHPYRRLETWEWETAHVVFDAAELKLPLLGYMVENTVLQQALWQALEAHPKVTLRVPGSLIALHRHNDLQELELKGGETILAKLVIGADGANSQVRQMAGIGVHAWQYAQSCMLISVQCENDPGDSTWQQFTPDGPRAFLPLFDNWASLVWYDSPARIRQLQNMNMAQLQAEIVKHFPSRLGYVIPLAAGAFPLIRRHALQYVQPGLALVGDAAHTIHPLAGQGVNLGYRDVDALIDVLVNARSYGEAWASYPVLKRYQMRRMADNFMMQSGMDLFYAGFSNNLPPLRFVRNLGLMAAERAGVLKRQALKYALGL

SEQ ID NO: 7300 - DNA, 1179 bp, Escherichia coli CFT073
  CDS (1)..(1179): transl_table=11
atgagcgtaatcatcgtcggtggcggcatggcgggcacgacgctggcgctggctatttcccggttaagtcacggggcgctgccagtacatttgattgaagcgaccgcgccagagtcacatgcgcatccgggctttgatggacgagctattgcgctggcggcgggtacctgtcagcaactggcgcgcatcggcgtctggcaatctctggctgattgcgcaactgccatcaccacagtgcatgtcagcgatcgtggtcacgctggatttgtcaccctcgccgcagaagattaccaactggcggcgctggggcaggttgtcgaattgcacaatgtcgggcaacggctgtttgcattgctgcgcaaagcacctggtgtaacgctgcattgccctgatcgcgtggctaacgttgcccgtactcagagccacgttgaagtgacgctggagagtggtgagacgctgacgggccgcgtgctggtagccgctgatggcacccattcagcgttagccaccgtgtgcggcgttgactggcagcaggatccttacgaacaactggctgtgattgcgaacgttgcgacttccgttgcgcatgaagggcgcgcttttgaacgctttacgcaacatggcccgctggcgatgttgccgatgtctgacggacgctgttcgctggtctggtgtcatccactggaacggcgcgaagaggtgctgtcgtggagcgacgagaagttttgccgtgaactccagtcggcctttggctggcgacttgggaaaattactcatgccggtaaacgcagtgcttatccgctagcgctaacccgcgccgccaaacctattacccatcgtaccgtgctggtgggcaatgcggcgcaaactctgcatcccatcgccgggcaaggatttaacctcggtatgcgtgatgtcatgagccttgcggaaaccctgactcaggcgcaggaacgcggagaagacatgggtgattacggcgtattgtgccgttatcagcagcgtcgacagagcgatcgcgaagcaaccatcggcgtcacggacagccttgtacatctttttgccaaccgttggacgccgctggttgtcgggcgcaacatcgggctgatgacgatggaattatttaccccagcacgcgatgtgctggcgcagcgcactcttggttgggtggcgcgttga

SEQ ID NO: 7301 - protein, 392 aa, Escherichia coli CFT073
MSVIIVGGGMAGTTLALAISRLSHGALPVHLIEATAPESHAHPGFDGRAIALAAGTCQQLARIGVWQSLADCATAITTVHVSDRGHAGFVTLAAEDYQLAALGQVVELHNVGQRLFALLRKAPGVTLHCPDRVANVARTQSHVEVTLESGETLTGRVLVAADGTHSALATVCGVDWQQDPYEQLAVIANVATSVAHEGRAFERFTQHGPLAMLPMSDGRCSLVWCHPLERREEVLSWSDEKFCRELQSAFGWRLGKITHAGKRSAYPLALTRAAKPITHRTVLVGNAAQTLHPIAGQGFNLGMRDVMSLAETLTQAQERGEDMGDYGVLCRYQQRRQSDREATIGVTDSLVHLFANRWTPLVVGRNIGLMTMELFTPARDVLAQRTLGWVAR

SEQ ID NO: 7302 - DNA, 1233 bp, Vibrio vulnificus CMCP6
  CDS (1)..(1233): transl_table=11
atgatacaaagtgtggatgtggcgatcgttggcggtggcatggtgggactggcgctggccgcggcatttaaagacagtgatttgcgtgtagcagtgattgaagggcaggctccaaatctgcaaatgaatgaactgccggatgtgagagtttccgcgctcagtcgttccagcgaacatatcttaaaaaatctgggtgcttggcaatccattgtggaaaaacgagcctctccttatgtggcgatggaagtgtgggatcaagacagttttggccacattgactttagtgcggatgcgatggcacagccggatcttggccatattgttgaaaatcgcgtcattcaactggcacttttggagcaggttaacaagctggataatgtgatggtgctgatgccttgtcagtgtcaatcgatgagtgtaggagagagcgaagtgtggttgtcgctcgacaatggtcaggcgctcacggccaaattggtggttggtgctgatggcgccaattcttgggttcgacgtcagcaggatatcccgctaactcattgggattatggccattctgcgatcgtagccaatgttcgcaccgtcgagccacatggctcagttgcacgtcaaatttttactcctcaaggacctttggccttcctgccaatgtctgaagagaacatgacctcgattgtgtggtcgactgaatcactgcgcgcaacgagtttgatggcgatgtcagaccgtgagttcaataaggcgctgagtgccgaatttgatatgcgtttgggactgtgcgaagtggttggggagcgttttagcgtgccactgaaaatgcgttttgctcgagattttgtcaaagagcgtgtcgccctgattggtgacgctgcacacacaatccatccgttggcggggcaaggtgtgaacttgggcttgctcgacgctgccagtctggcgcaagagatcctcgcgctttggcaacgtggtgaagacattggtaccaagcgcaacctgcgtcgttttgaacgttggcgtaaagcggaagcggcgcaaatgattgccgcgatgcaaggttttcgagagttgtttgccggctctaatccgttgaaaaagttcttacgtggcgttggtttgacaatggcaggacaccttccgggtgctaaagagcaaatcatgagacgtgcgttgggattggatggcgaacttcctgagttggcgaaacgtcgtcaaccagagctgattcgctcatag

SEQ ID NO: 7303 - protein, 410 aa, Vibrio vulnificus CMCP6
MIQSVDVAIVGGGMVGLALAAAFKDSDLRVAVIEGQAPNLQMNELPDVRVSALSRSSEHILKNLGAWQSIVEKRASPYVAMEVWDQDSFGHIDFSADAMAQPDLGHIVENRVIQLALLEQVNKLDNVMVLMPCQCQSMSVGESEVWLSLDNGQALTAKLVVGADGANSWVRRQQDIPLTHWDYGHSAIVANVRTVEPHGSVARQIFTPQGPLAFLPMSEENMTSIVWSTESLRATSLMAMSDREFNKALSAEFDMRLGLCEVVGERFSVPLKMRFARDFVKERVALIGDAAHTIHPLAGQGVNLGLLDAASLAQEILALWQRGEDIGTKRNLRRFERWRKAEAAQMIAAMQGFRELFAGSNPLKKFLRGVGLTMAGHLPGAKEQIMRRALGLDGELPELAKRRQPELIRS

SEQ ID NO: 7304 - DNA, 1230 bp, Pseudomonas syringae pv. tomato str. DC3000
  CDS (1)..(1230): transl_table=11
atggaaacgcgtgcagatgtgttgattgtcggggccggaatggtcggcagtgctcttgcgctggccttgcagggcagtggccttgatgtgctggtggtcgacggcgggccgctgagcgtcaaaccctttgacccgcaatcgactttcgagccacgggtcagtgccttgtcagcggccagccagcgcattctgcagcggcttggcgtgtgggatggcatcgcgtcgcgacgtaccagcccttacgcgcacatgcacgtctgggatggcagcggcaccgggcagatccacttctcggcctctagtgtgcatgccgacgtgctgggccatatcgtcgagaaccgagtggtgcaggatgcgttgctcgaccgtttgcatgacagcgacatcggcctgctggccaacgcgcggctagagcagatgcgtcactccggcgatgactggttgctgacgctggcggacggtcgtttgctgcgtgcgccgctggtggttgccgccgacggtgctaactcggcagtacgccgcctgaccgaaacgccgacgcgcgagtgggattacctgcaccacgccatcgtcaccagcgtgcgcacggccgattcccacaagaaaaccgcctggcagcgtttcacggatgacggcccgctggcgtttctgccgctggaccgtgagggcgagcactggtgttccattgtctggtcggtcacgccagcagaagccgagcgtttgatggtgctggaagatgatctgttctgccgtgagctggagcaggcgttcgagggccggctgggccaggtcttgtctgccgacgcgcgcctgtgcgtgccgctgcgccagcgtcacgccaagcgctacgtcgccaatggcctcgcgctgattggggacgcggcgcacaccattcacccgttggccgggcagggcgtgaacctgggttttctggatgctgcggtgctggcgcaagtgctgacccacgcagcgcagcgtggcgagcgcgtggcagacctgcgcgtgctgggccgctacgagcgtcgccgcatgccgcacaacctggcattgatggcggcgatggagggctttgaacgcctgttccaggccaacccgctgccactgcgctggctgcgtaataccggcctgaaaatggtcaaccaaatgcccgaggccaaggctctgttcgtgcgcgaagccttaggtttgtcgggcgatctgccggagttggcacggcttgacgctcgttag

SEQ ID NO: 7305 - protein, 409 aa, Pseudomonas syringae pv. tomato str. DC3000
METRADVLIVGAGMVGSALALALQGSGLDVLVVDGGPLSVKPFDPQSTFEPRVSALSAASQRILQRLGVWDGIASRRTSPYAHMHVWDGSGTGQIHFSASSVHADVLGHIVENRVVQDALLDRLHDSDIGLLANARLEQMRHSGDDWLLTLADGRLLRAPLVVAADGANSAVRRLTETPTREWDYLHHAIVTSVRTADSHKKTAWQRFTDDGPLAFLPLDREGEHWCSIVWSVTPAEAERLMVLEDDLFCRELEQAFEGRLGQVLSADARLCVPLRQRHAKRYVANGLALIGDAAHTIHPLAGQGVNLGFLDAAVLAQVLTHAAQRGERVADLRVLGRYERRRMPHNLALMAAMEGFERLFQANPLPLRWLRNTGLKMVNQMPEAKALFVREALGLSGDLPELARLDAR

SEQ ID NO: 7306 - DNA, 1209 bp, Vibrio parahaemolyticus RIMD 2210633
  CDS (1)..(1209): transl_table=11
atgatgcaaagtgtagatatcgccatcatcggcggagggatggttgggttggcgcttgccgccgcattcaaagacagtgacctgcgtatcgccgtgatcgaaggtaacgtgccagatgaaacgttgaatgaactgcctgatgtgcgagtttctgcactgagccgctcaagtgaaaccattttacgtaagctaggagcttggcagggtattgagcaacgccgagcttcaccttactacggtatggaagtgtgggagcaagacagcttcgcaaaaatagagtttgatgcacaaaatatggcgcaacctgatttgggtcacatcgttgaaaatcgcgtgattcagttagcgttgttggaacaagtgcaaaagctagagaacgtaacgttattcatgcctgcgcgctgtgcgacactcgcggtcggtgaacaagagagttggttaacgctcgataacggccaagcgatgacagcgaagctggtggtgggcgcagatggcgcgaattcgtggctgcgtaaccagatggatattcctttgacgcattgggactacggtcaccatgcgttggttgctaatgtgaaaacagcggatccgcaccacagcatcgcgcgtcagatttttacacctcacgggcctttggcattcttgccaatgtctaaaccaaacatgtgttctatcgtttggtcgacagagccgaaccgagcggaagaattgctggtcatgagcgatgaagcgttcaacaaaacgctaaccagcgaattcgatgctcgtttaggcgtgtgtgaagtggtgggagagcgagcggcgtttccgctaaaaatgcgttatgcccgagactttgtagttgagcgtgttgcactggttggcgatgcggctcataccatccacccattagcaggccaaggcgtgaatctcggcttattggatgcagccagtctggcgcaagaagtactgactctttggaaacaagggcaagacattggtagtaaacgcaatctgcgtggctatgagcgttggcgtaaggctgaagcggcgaagatgattgcggcgatgcaaggtttccgtgatttattctctggtggccatccagcgaaaaaactggttcgcggtattggcttgagtttagcgggacaattaccgggtgctaaagatgagatcatgaagcgtgcactgggtttgaaggggcacctaccagaactggctcgtcaatag

SEQ ID NO: 7307 - protein, 402 aa, Vibrio parahaemolyticus RIMD 2210633
MMQSVDIAIIGGGMVGLALAAAFKDSDLRIAVIEGNVPDETLNELPDVRVSALSRSSETILRKLGAWQGIEQRRASPYYGMEVWEQDSFAKIEFDAQNMAQPDLGHIVENRVIQLALLEQVQKLENVTLFMPARCATLAVGEQESWLTLDNGQAMTAKLVVGADGANSWLRNQMDIPLTHWDYGHHALVANVKTADPHHSIARQIFTPHGPLAFLPMSKPNMCSIVWSTEPNRAEELLVMSDEAFNKTLTSEFDARLGVCEVVGERAAFPLKMRYARDFVVERVALVGDAAHTIHPLAGQGVNLGLLDAASLAQEVLTLWKQGQDIGSKRNLRGYERWRKAEAAKMIAAMQGFRDLFSGGHPAKKLVRGIGLSLAGQLPGAKDEIMKRALGLKGHLPELARQ

SEQ ID NO: 7308 - DNA, 1182 bp, Chromobacterium violaceum ATCC 12472
  CDS (1)..(1182): transl_table=11
atggaacaccgcgacatcgtcatcgtcggcggcggcatggtgggcagcgcgctgggcgcggcgctctcgggcaagggcctgtcggtctctgtgctggaacgggaagcccccgcgccgttcgcgccggaacaggcgccggacctgcgggtctcggcgatcagcccggcttccgccgcctttctgcaaaccatcggcgcctggggccaggcgctggcgatgcgcgccgcgccctatcgccgcatgcaggtctgggagcgggacgaggccgccggcacgctgttcgacgccgccgaggccggcgtgcccgaactgggccacatcgtggaaaaccgcgtggtgcagctggccgccaccgaggccttgctggccaagggcgacatcgactaccgctgcccggccgtggtgtcggacatcgtctaccgtccccaagcctcccagttgacgctgtcggacggcagcaggctgcaagccaggctgctgatcgccgccgacggcgcccgctctcaggtgcgcgacgccgccggcatcggcgtcaccggctgggactacccgatgcacgcgctggtcctgtcctgccggatcgacggcggccagcaggacatcacctggcagcgcttcacgccggacggcccgcaggccttcctgccgctaagcggcgacgcggcctccctggtgtggtaccaccggcccgaagaggtgaagcgcttgctgacgctgggcgacgacgagctgatcgccgccgtcagccaagcgtttccgcgcaagctgccgggcatccgggagctggcggcgcgcggcagcttcggcctgacccgccgccacgcccaatgctacgtcaaggacggcgtggcgctggccggcgacgccgcccacaccatccacccgctggcaggccagggcgtcaacctgggcttccaggacgcagcgatgctggcccggaccattctggacgcccatgccaagggagaggattgggcgagcgggaagacgctggtgcgctatcagcgcgcgcgcaagcccgccaacctggcgatgcaggccggcatggacgccttctgctacggctttgccaacgatatcggcccgctgcgcctgctgcgcggcctgggcttgcggctggcagacaaggccgggccgctgaagcgcgaggcgatacgctacgcgctggggctgcgcgcctga

SEQ ID NO: 7309 - protein, 393 aa, Chromobacterium violaceum ATCC 12472
MEHRDIVIVGGGMVGSALGAALSGKGLSVSVLEREAPAPFAPEQAPDLRVSAISPASAAFLQTIGAWGQALAMRAAPYRRMQVWERDEAAGTLFDAAEAGVPELGHIVENRVVQLAATEALLAKGDIDYRCPAVVSDIVYRPQASQLTLSDGSRLQARLLIAADGARSQVRDAAGIGVTGWDYPMHALVLSCRIDGGQQDITWQRFTPDGPQAFLPLSGDAASLVWYHRPEEVKRLLTLGDDELIAAVSQAFPRKLPGIRELAARGSFGLTRRHAQCYVKDGVALAGDAAHTIHPLAGQGVNLGFQDAAMLARTILDAHAKGEDWASGKTLVRYQRARKPANLAMQAGMDAFCYGFANDIGPLRLLRGLGLRLADKAGPLKREAIRYALGLRA

SEQ ID NO: 7310 - DNA, 1170 bp, Chromobacterium violaceum ATCC 12472
  CDS (1)..(1170): transl_table=11
atggattctacgatgagtgaacatgccgatgtgctgatcgtcggcggcggcccggtgggcgcgctggccgccttgaggctggcgcggcagggccgcagcgtgctgctgctggaggcgcgcgcgaaagacgccgaggtgcgcgacgcccgcgcgctggcgttgtcctggcatagccgccgcctgctggaagaggccggcgcctggccggccgacctgccggccacggcgatagacaccgtccacgtgtcgcagcagggcggttgcggccgcacccggctggacagcgcggacctgggtctgccgcacctgggcgcggtggtcgattacccggccttggtcgctggcctgggcggcgcgctggaggcggcgggcgtgcaggtgatatggcaatgccgggtgacggcggtgaagagtctgagccagtacgcatgcgccgaggtggaaacgccgcagggcaagcagctgctgaccggcagcctgctggtattggccgagggcggcgcgctggctgagacgctgccgggcatccgccggctgacacatgattaccgtcagtgcgcgctgctggccgaggtggagaccgaactgccgccccagggcgtggcgtacgagcgcttcgcccacgccgggccgttcgcgctgctgccgcacggcgagcgctacatgctggtgtggacccgcagccaggccgatgccgagcggctggccgccgccgacgcggcggtattgcgcgacgagctgcagcaggctttcggagagcgccagggacggatattgtcgatcgggcccagggccagtttcccgctggcgctgcgccaggccaaccgggtgaccagcgggcgggtggcgctgatcggcaatgccgcccagaccatgcacccggtggcggctcagggcctgaatctgggcttgcgggatgcggtcggcctggccgacgcgctggagaacgcagccgacgccggcgacgcgcgcgcgttgaagcgctacgcggattcgcgcaagctcgacagccacgcggtggtcggcttcacccatggcttgatcaagctgttcgacggccatcacccgctgatgagccggctgcgcggcgtcggcatgacggcgctggacgcgctgccgtccttgcggcgcaaattcgccggccacctggtgttcggcgtgcggggataa

SEQ ID NO: 7311 - protein, 389 aa, Chromobacterium violaceum ATCC 12472
MDSTMSEHADVLIVGGGPVGALAALRLARQGRSVLLLEARAKDAEVRDARALALSWHSRRLLEEAGAWPADLPATAIDTVHVSQQGGCGRTRLDSADLGLPHLGAVVDYPALVAGLGGALEAAGVQVIWQCRVTAVKSLSQYACAEVETPQGKQLLTGSLLVLAEGGALAETLPGIRRLTHDYRQCALLAEVETELPPQGVAYERFAHAGPFALLPHGERYMLVWTRSQADAERLAAADAAVLRDELQQAFGERQGRILSIGPRASFPLALRQANRVTSGRVALIGNAAQTMHPVAAQGLNLGLRDAVGLADALENAADAGDARALKRYADSRKLDSHAVVGFTHGLIKLFDGHHPLMSRLRGVGMTALDALPSLRRKFAGHLVFGVRG

SEQ ID NO: 7312 - DNA, 1179 bp, Photorhabdus luminescens subsp. laumondii TTO1
  CDS (1)..(1179): transl_table=11
atgaacgtgattatcgttggtggaggcatgaccggcgcgacgcttgcgctggcgatatcttccctgagtaaggggcagatccatgtgtccctgattgaagcagcagagccggagcagaaacatcccggctttgatgccagagcgatagcgctggcttacggtacttgtcagcgtttacaacagattggtgtttggtctgctctggaagattatgtgataccaataactcacgttcatgttagtgatcgtggtcatgcagggtttgtgaatctttatgcaaaagaatataacattccagcgctaggtaatgttattgaattgtatgatgcagggcagggtttgttcggattgctgaaaaatgcgcctggtgtaacgctatattgtccatccaaggttatggctgttgaaagaactttgtcatcggttgctgtcattttggacagtggcgaacgattgcaaggtgaattgctggtagcagcagatggcagtcattctgccattggtcacgcttgtaatattcagtggcagcggcatgcttatgagcaggttgccgtgattactaatgtactgacttcagagcatccgcgaggtagggcatttgaacgtttcaccgaatatggcccacttgctttgctgccaatgtctgaggggcggagctcgctggtatggtgccatcagttggcgcggagaaaggagatagcgggttggaataatgagcaatttcttaggcagttacagcaagcatttggctggagactggggaaaatattggaaaccggccagcgttatcgctatccattgacactatctactgcaaatcaacaaattagccaccgattggcgctggtgggaaatgctgcacaaacattacatccgattgcgggtcagggctttaatcttggtatgcgagatgttatgacactggctcagattgtttctgaggcttttgctgctggtcaggatattggtgcttaccaggtcctggctaactatcaacagcaacgggttttagatcgggaaaacaccattgatattaccgatggattgatacgggtatttgccaatcgttattttccattacaaatcgggcgtaactttggcctgatgatgatggaaaaatgccctcctatgcgggatatactggcccgtcagactctaggttgggtcgcccaaagataa

SEQ ID NO: 7313 - protein, 392 aa, Photorhabdus luminescens subsp. laumondii TTO1
MNVIIVGGGMTGATLALAISSLSKGQIHVSLIEAAEPEQKHPGFDARAIALAYGTCQRLQQIGVWSALEDYVIPITHVHVSDRGHAGFVNLYAKEYNIPALGNVIELYDAGQGLFGLLKNAPGVTLYCPSKVMAVERTLSSVAVILDSGERLQGELLVAADGSHSAIGHACNIQWQRHAYEQVAVITNVLTSEHPRGRAFERFTEYGPLALLPMSEGRSSLVWCHQLARRKEIAGWNNEQFLRQLQQAFGWRLGKILETGQRYRYPLTLSTANQQISHRLALVGNAAQTLHPIAGQGFNLGMRDVMTLAQIVSEAFAAGQDIGAYQVLANYQQQRVLDRENTIDITDGLIRVFANRYFPLQIGRNFGLMMMEKCPPMRDILARQTLGWVAQR

SEQ ID NO: 7314 - DNA, 1221 bp, Vibrio vulnificus YJ016
  CDS (1)..(1221): transl_table=11
gtgtttcgcaaactagccagtaaaacgtacaatgcaaaaccgtctttgaatcaagttgatcaagagtacaagatgaataaatacgacattgccgtcgtcggtggcggcatggtaggcgcggctgtggccatcggatttgccaaacaaggcagaaaagtcatcgtggttgaagggtttgagccgaaagcgtttgaagcaagccaaccgatggacatccgagtgtccgccatttcccataactccgtgcgtttgctggaatcgctaggggcctggcaacatattcaagcaactcgagtttgtccctacaaacgcttagaaacctgggagcacccagaatgtcgtacacgttttcacagcgatgaactcaatttggaacagctaggttacattgtggagaaccgtctaattcaattggggttgtggcaagagtttgctcaatacccgaatttgactctgcaatgcccagataaactgaagcgtcttgagttcgatgagatcaacacgttgacgcttgagagtggtttagaaattgaagcctcttgggtcattggcgcagatggtgccaactctcaggtgcgtgagttggctggcattggcattaccgcatgggattatcgtcaacattgtatgttgatcaatattgcgacggaatctgcgcaacaggcgatcacttggcagcaattcactccaactggcccacgatcttttttgccattgaaaggccagcaaggttctttagtttggtacgattcacccaaacgtattcgtgagttgtcagccatgagcgctgaaaagctgaaacaggaaattattcgtcatttccctgatgaattgggagagtttgacgtgctgtactgggattctttcccattaacccgacgacatgcacaagcgtattatcaacaaaattgtttgttggttggcgatgcggcccacacgatcaatccattagctggccaaggtgtcaatcttggttttaaagacgttgaagcgttactcaaggcgacggaaaaccaacctttgacagtggctcaacaagcggcctatcagaaagcacgctatgcggacaacttgctaatgcaaactgggatggatctgttctacaaaggctttagtaacgatatcaccccattaaaattggttcgtaacgcagccctcaagttggctgagcactctgggcctatcaaacatcaagtgttgaaatatgcgctaggaatgtga

SEQ ID NO: 7315 - protein, 406 aa, Vibrio vulnificus YJ016
MFRKLASKTYNAKPSLNQVDQEYKMNKYDIAVVGGGMVGAAVAIGFAKQGRKVIVVEGFEPKAFEASQPMDIRVSAISHNSVRLLESLGAWQHIQATRVCPYKRLETWEHPECRTRFHSDELNLEQLGYIVENRLIQLGLWQEFAQYPNLTLQCPDKLKRLEFDEINTLTLESGLEIEASWVIGADGANSQVRELAGIGITAWDYRQHCMLINIATESAQQAITWQQFTPTGPRSFLPLKGQQGSLVWYDSPKRIRELSAMSAEKLKQEIIRHFPDELGEFDVLYWDSFPLTRRHAQAYYQQNCLLVGDAAHTINPLAGQGVNLGFKDVEALLKATENQPLTVAQQAAYQKARYADNLLMQTGMDLFYKGFSNDITPLKLVRNAALKLAEHSGPIKHQVLKYALGM

SEQ ID NO: 7316 - DNA, 1233 bp, Vibrio vulnificus YJ016
  CDS (1)..(1233): transl_table=11
atgatacaaagtgtggatgtggcgatcgttggcggtggcatggtgggactggcactggccgcggcatttaaagacagtgatttgcgtgtagcagtgattgaagggcaggctccaaatctgcaaatgaatgaactgccggatgtgagagtttccgcgctcagtcgttccagcgaacatatcttaaaaaatctgggtgcttggcaatccattgtggaaaaacgagcctctccttatgtggcgatggaagtgtgggatcaagacagttttggccacattgactttagtgcggatgcgatggcacagccggatcttggccatattgttgaaaatcgcgtcattcaactggcacttttggagcaggttaacaagctggataatgtgatggtgctgatgccttgtcagtgtcaatcgatgagtgtaggagggagcgaagtgtggttgtcgctcgacaatggtcaggcgctcacggccaaattggtggttggtgctgatggcgccaattcttgggttcgacgtcagcaggatatcccgctaactcattgggattatggccattctgcgatcgtagccaatgttcgcactgtcgagccacattgctcagttgcacgtcaaatttttactcctcaaggacctttggcctttctgccaatgtctgaagagaacatgacctcgattgtgtggtcgactgaatcactgcgcgcaacgtgtttgatggcgatgtcagacagtgagttcaataaggcgctgagtgccgaatttgatatgcgtttgggactgtgcgaagtggttggggagcgttttagcgttccactgaaaatgcgttttgctcgagattttgtcaaagagcgtgtcgccctgattggtgacgcagcacacacaatccatccgttggcggggcaaggtgtgaacttgggcttgctcgacgctgccagtctggcgcaagagatcctcgcgctttggcaacgtggtgaagacattggtaccaagcgcaacctgcgtcgttttgaacgttggcgtaaagcggaagcggcgcaaatgattgccgcgatgcaaggttttcgagagttgtttgccggctctaatccgttgaaaaagttcttacgtggcgttggtttgacaatggcaggacaccttccgggtgctaaagagcaaatcatgagacgtgcgttgggattggatggcgaacttcctgagttggcgaaacgtcgtcaactagagctgattcgctcatag

SEQ ID NO: 7317 - protein, 410 aa, Vibrio vulnificus YJ016
MIQSVDVAIVGGGMVGLALAAAFKDSDLRVAVIEGQAPNLQMNELPDVRVSALSRSSEHILKNLGAWQSIVEKRASPYVAMEVWDQDSFGHIDFSADAMAQPDLGHIVENRVIQLALLEQVNKLDNVMVLMPCQCQSMSVGGSEVWLSLDNGQALTAKLVVGADGANSWVRRQQDIPLTHWDYGHSAIVANVRTVEPHCSVARQIFTPQGPLAFLPMSEENMTSIVWSTESLRATCLMAMSDSEFNKALSAEFDMRLGLCEVVGERFSVPLKMRFARDFVKERVALIGDAAHTIHPLAGQGVNLGLLDAASLAQEILALWQRGEDIGTKRNLRRFERWRKAEAAQMIAAMQGFRELFAGSNPLKKFLRGVGLTMAGHLPGAKEQIMRRALGLDGELPELAKRRQLELIRS

SEQ ID NO: 7318 - DNA, 1410 bp, Aedes aegypti
  CDS (1)..(1410)
atgtcctcaattctcagtggtgtatcgcgaagcttgctccctcgagttcggtgtaccgttcttcagtggcgtctggccagtggcgcaactccacacgccacttccagcagtagcgaaaagccggccgaattctacgacataatcatcgccggcggaggaatggtcggaacaacgctggcctgttcattgggtaaaaatccccgcctggcggatcgccgaatcctgctgctggaggcggccaccggtttcaagcagccttcgaccgagacctacagcaatcgggtgtcggccatcagcaagggaacgcaccgtctcatgaaggccatcggggcgtgggaacagatcgaggccacccgggtcaagccggttctgaagatgcaggtttgggacgcgtgttccgatgcgctgatcacgttcaattacgacgatttggcggataacatttcgtggattgtggagaacgatgtgctgctggcgagcgtctatcggcagctggagggcgtgaagaatgtggacatccggtacggtgcgaggatggaggggtgtggcttgataagggacggggcggagatgagcacggttcggctcagcaacggggagcagttgcagtgtgagctgctggtcggtgccgatggatacaattccctggtccggcgaacgatgggagtggacaacttcacactggcctacgaccagatgggagtggtggcaaccctgaagctaggcggcgcagctgccaacaacgtcacggcctggcaacgattccttccgacgggaccagtagccttgttgcctcttaatgacgaaatgagttctttggtctggtccactagcatttcggaagcaaagcgattgctacatctggatgatcactcgttcgtggcagcactcaatgaagctttgaccaaatcctatccaaggaacaacgtcatcgaagaagttctaaagaatgtaaattcgttcatcacttccaccacgggccaacgcttggaacagccaccactggtggaagccgtggttgaaaagtctcgcgccgcattccccctcggattgggtcacaccagcacctacgttggacacggcgtttgcttgatcggtgacgccgcccatcgcgtacatcccctcgccgggcaaggcgtcaacctcggcttcggagacgtccagtgtctgacggatgtcctggcggacgccaactacagtggcctcggcctcaacaacctcgcacaactagtcaaatacgaacaggaacgtctccggcacaacgttcccgtaattctgacgacccacggtcttcagcgactgtacacgaccgatttcccgccgattgtgggccttcgaagcatcggactgaccatcaccaattcgcttcccccggtgaagaacttccacgggaagttccctcaaatttag

SEQ ID NO: 7319 - protein, 469 aa, Aedes aegypti
MSSILSGVSRSLLPRVRCTVLQWRLASGATPHATSSSSEKPAEFYDIIIAGGGMVGTTLACSLGKNPRLADRRILLLEAATGFKQPSTETYSNRVSAISKGTHRLMKAIGAWEQIEATRVKPVLKMQVWDACSDALITFNYDDLADNISWIVENDVLLASVYRQLEGVKNVDIRYGARMEGCGLIRDGAEMSTVRLSNGEQLQCELLVGADGYNSLVRRTMGVDNFTLAYDQMGVVATLKLGGAAANNVTAWQRFLPTGPVALLPLNDEMSSLVWSTSISEAKRLLHLDDHSFVAALNEALTKSYPRNNVIEEVLKNVNSFITSTTGQRLEQPPLVEAVVEKSRAAFPLGLGHTSTYVGHGVCLIGDAAHRVHPLAGQGVNLGFGDVQCLTDVLADANYSGLGLNNLAQLVKYEQERLRHNVPVILTTHGLQRLYTTDFPPIVGLRSIGLTITNSLPPVKNFHGKFPQI

SEQ ID NO: 7320 - DNA, 1359 bp, Physcomitrella patens subsp. patens
  CDS (1)..(1359)
atggagaagaagcaagctggttcagaagatgaatacgatgtggttatcgttggtggaggaatggttggtgcagcagtcggctgtggccttgcttgttcaccattgtcgagagatctgcgggtggccatcattgacagttccaaaccaatggccgcaccaaagcatgaccccaaggccgttccagaccaacgtgtcagtgcgattactcctgctaccgtacgctttttcaaagaagtgggagcttgggaatctgttcaagctgcaatgcctacgcccttcgatgcgatgcaggtttgggattacgaagggcttgggtacactcgttacactgctgacgacgtcggtgcatatgtactagggtatgtagtggagaataaagtgttacttggcgcccttcgttcccgtattgagaatgcaggatccgttgattttatctgtccagcacaggtgaaatcagtccttctcccaactccaagtgggcaaggcctcgattcaccgcaagatagggcggaagttgggctcaatgacggcaggtccttaagagcacgccttgtggttggggcagatggaggcaggtcagcagtaagagcgacggcgggctttcaaacaagaggatgggagtataagcaaagcgctgtaatctgcacagtgcgtgtagagacaaatcatgctactgcatttcaaagatttttgccaactgggccattcgcgttgctgcccttgaacgacacctacagcaacatagtgtggacaaccacacctgaaaaggctgatgctcttaaaaccatgtcagctgagcagtttgtggtagaagcgaacaaagcattaatagatgatcatggtccaaaaccaggatcaaagattgctgagatagtagggaatgtggtaacttcctcaccgctgctgggtgccatgggtccttcagcatcagagccgttccaagaacccccgcgaattgtagattgcgcgactccgcggctttcgttcccgttgtcgttaatgcatgccagcaactatgttgggcatcgtgtggctcttgttggcgatgctgctcatacggttcacccacttgctggacagggagtcaatttagggtttggggatgctgcttctctctcgaaagtactacagaaaggagtagaaaccggccatgatattggacagatagatttgttggaggagtacgagcgggaacgaaaaaggaccaacttgacgatgatggctattttggatggattccagaaaatgtattccagtgatttcggtcctctcaaatatgctcgctccttcggtttcaatgcagtccatgcactgggtcctctaaagaagcaaataatatcgtatgcaatgggtgtatag

SEQ ID NO: 7321 - protein, 452 aa, Physcomitrella patens subsp. patens
MEKKQAGSEDEYDVVIVGGGMVGAAVGCGLACSPLSRDLRVAIIDSSKPMAAPKHDPKAVPDQRVSAITPATVRFFKEVGAWESVQAAMPTPFDAMQVWDYEGLGYTRYTADDVGAYVLGYVVENKVLLGALRSRIENAGSVDFICPAQVKSVLLPTPSGQGLDSPQDRAEVGLNDGRSLRARLVVGADGGRSAVRATAGFQTRGWEYKQSAVICTVRVETNHATAFQRFLPTGPFALLPLNDTYSNIVWTTTPEKADALKTMSAEQFVVEANKALIDDHGPKPGSKIAEIVGNVVTSSPLLGAMGPSASEPFQEPPRIVDCATPRLSFPLSLMHASNYVGHRVALVGDAAHTVHPLAGQGVNLGFGDAASLSKVLQKGVETGHDIGQIDLLEEYERERKRTNLTMMAILDGFQKMYSSDFGPLKYARSFGFNAVHALGPLKKQIISYAMGV

SEQ ID NO: 7322 - DNA, 1470 bp, Acyrthosiphon pisum
  CDS (1)..(1470)
atgttgtcattaaactcatctgccaaccgattttatttgtccctgggtaatgtcgcaaattattcaagtaaaaagtactacgatatcgttatagctggcggtggcatggtgggctgtgctatggcctgcaaattatctaaagaatctgcgttacgtggtatgtctattctcctattagaaggaggtccaaatcgtaaagaatatgatttgtccgccaagaaaaatacactcgacaagctttacagtaatagagtctctgctgtgagcaagtcgagtgttcgacttttacaatcgattggagcttggcaaattattgaagatttaggacgtaataatgcagtcaaagaaatgcgaatttggaattctggtgcaggtagaagcggtggtatcaataatgtgttagcatttgataatgttaaggatttagcatatattgttgaaaacgacactattcttggagccctgtacaaaaaaattaacgaagagcaaaatattactgtaaattatgatacgcgagttaatcaatgtaatttgtctgattcccatagagatttggctactgttaaagtggctaatggagaaatttcctttgaaactagtctcttaattggctcagatggatatggttctaaagtacgttcagctattagtggtcagcagtatattggttgggaatatggtcaacgtgcagttgtagcaactttacatatacagtctgatgaagataatatctataaaggacacgttgcttggcaaaaatttgctcagttaggtccagtggctctattacccttggatgataaaacatgttcactagtatggactacaagttatgaagaagcaaatcgcttagcagagttgagtgacaatgaatttattgatgctttaaatgacagtttatcggaagaaaaagaatcaaataatagtagcttactattagctgacgatgcagctcatatattggccaacgtactcaataaatactgccagtcaaatgatgaaaataaacaaagcaaaataataaaatctattccaccaattgtcgttggtgtaataaaagatagtagagcatcattcccgttaggctttggacacgcgtgtcaatatgttggtcagcgtgttgctttagttggagatgctgcacacagaatacaccctttagctgggcaaggtgttaatttgggctttagtgatgttactgaattaagtaatcaacttaaccaatcagtattaacaggcgccgatattggagatctgaatgcacttttaaattatcaaactgcagcacagcgtcataatgtacccattatgttaggtgttgatggcattcaaaaaatttatggtagcaaaaacaatttagttccacctgctattacaacattaatacgtaatgtaggacttacaatttgtcaatctactcccataataaaaaaactgttgagtgacaaagcatctggacttcctgtatag

SEQ ID NO: 7323 - protein, 489 aa, Acyrthosiphon pisum
MLSLNSSANRFYLSLGNVANYSSKKYYDIVIAGGGMVGCAMACKLSKESALRGMSILLLEGGPNRKEYDLSAKKNTLDKLYSNRVSAVSKSSVRLLQSIGAWQIIEDLGRNNAVKEMRIWNSGAGRSGGINNVLAFDNVKDLAYIVENDTILGALYKKINEEQNITVNYDTRVNQCNLSDSHRDLATVKVANGEISFETSLLIGSDGYGSKVRSAISGQQYIGWEYGQRAVVATLHIQSDEDNIYKGHVAWQKFAQLGPVALLPLDDKTCSLVWTTSYEEANRLAELSDNEFIDALNDSLSEEKESNNSSLLLADDAAHILANVLNKYCQSNDENKQSKIIKSIPPIVVGVIKDSRASFPLGFGHACQYVGQRVALVGDAAHRIHPLAGQGVNLGFSDVTELSNQLNQSVLTGADIGDLNALLNYQTAAQRHNVPIMLGVDGIQKIYGSKNNLVPPAITTLIRNVGLTICQSTPIIKKLLSDKASGLPV

SEQ ID NO: 7324 - DNA, 1344 bp, Magnaporthe grisea 70-15
  CDS (1)..(1344)
atgctgtccaggccatccaccacacgttacatctgccgaaggtgtaacgacgtcgtcaagaggtcaaggacagcggcgcgttcatatgcaagcagcgccggagccaagcccgatatctacgatgtcgtctgtgtaggaggtggcccagctgggcttagtttgttgactgccctcagggcaaatccagcaaccgccgggcttcgaatcgccctcgtcgaggcgcaagatctctccaagctccgaaactggagccttcctccgaatcggtactcaaaccgatgcagctccctcaccccctcatccgcacactttctcgactcgataggcgcatggtcacgcctggatcggcagcgcgtgcaggcataccaggagatgcaggtctgggacggcgtcacgggggcccgcatagaattcgattgggcagggacggcagaggcggcgcgcggcaacaccatcgcctacatggtggagaacctcaacctcacgtcgggcttgctgcggcgcctcgaggagctgggcggtgttgacgtgtttgacaatgcgagggtcgaggatattgcgctcggcaaggatacagaggacatggacctttccgagtggcccgtcgtcagcctcgcgggcggcaggcagctgtttgcgaggttgctggtcggcgcggatggcgccaacagccccgtcaggtcttttgctggcattgatgccaaggggtgggactatggcaggcacggagtggtggctactctaaggctcgaagacgacgtcgcagcacatgacagcatgtacagggttgcgtaccaacgtttcttgccctcgggtccgatagcctcgctccccatgccgggtaactactccacgttggtgtggtctacaacacctgcatacgccgcactcctcaagagcctctcgccagccgacttcaccgccatggtcaacgccgccttccgcctgagtcccgtggacctcgagtatatgcacacgataccctccggacaagccgacgagctggcctggcgcctacagcacgccaccatcgacgccccgccgtcaccgcgagcgctgcccgcccccgtggtggaggtgcaggagggctccgtcgcgtcgttcccgctccgcatgcggcacgccgacacgtacattggcgagcgcgtggcgctggtgggcgacgccgcgcacacggtgcacccgctagccggccagggcttgaatgcgggccagggcgacgtcgagagcctctcgcgcaccatcgccgaggccgtggcgcatgggcaggacctcggcaccccgcatgtcgctcgagccgtacgaggcggagcggccgcggggaacggattcaagctgttttga

SEQ ID NO: 7325 - protein, 447 aa, Magnaporthe grisea 70-15
MLSRPSTTRYICRRCNDVVKRSRTAARSYASSAGAKPDIYDVVCVGGGPAGLSLLTALRANPATAGLRIALVEAQDLSKLRNWSLPPNRYSNRCSSLTPSSAHFLDSIGAWSRLDRQRVQAYQEMQVWDGVTGARIEFDWAGTAEAARGNTIAYMVENLNLTSGLLRRLEELGGVDVFDNARVEDIALGKDTEDMDLSEWPVVSLAGGRQLFARLLVGADGANSPVRSFAGIDAKGWDYGRHGVVATLRLEDDVAAHDSMYRVAYQRFLPSGPIASLPMPGNYSTLVWSTTPAYAALLKSLSPADFTAMVNAAFRLSPVDLEYMHTIPSGQADELAWRLQHATIDAPPSPRALPAPVVEVQEGSVASFPLRMRHADTYIGERVALVGDAAHTVHPLAGQGLNAGQGDVESLSRTIAEAVAHGQDLGTPHVARAVRGGAAAGNGFKLF

SEQ ID NO: 7326 - DNA, 1554 bp, Gibberella zeae PH-1
  CDS (1)..(1554)
atgacaattgatagcgcggttgtctgtggcaactcaaatcagcttcaggtcatgtcttttgctggattgaaacatcggccccaaggaacaatgttggctcgtcgatcagctctagtccagccgggctttgtctgtcgaacatgtgctcgtcaatatcagtctcaacttcggcgggcttcaacttccacacaggacaatatttatgatgtcgtatgtgttggtggcggaccagcaggtttaagtctactcactgctcttcgtgccaatcctataactgccggtcttcgagttgcccttattgaagctcaagatctctccaagatctcctcgttctcactccccccgacccaattctccaacagatgcagctctctcacccctgcgtcggctcagtatctcgacaagatcggcgcatggcgacatttgcaacgtgatcgggtccaggactaccaggagatgcaagtatgggatggagtcactggtgcccgaattgagttcgactggccacccagtacaactggagataaaacaatcgcctatatgacagagaatctcaatttaacatccggactactcaaaagattgcacgagcttggtggagtggacattttcgataagaccaaggtcgagggcatcgatctaggcaaggaaaccgaggacttggacttgagcgaatggcctgttgtacagctctcgaacggccaatcgctggcagcacgtcttcttgttggagcagatggagccaacagtcctgtgcgcacatttgccggcatcaatagccgcggctgggactacggtagacacggtgttgtcgcaactttagagcttgaaggtgagggctggggtggtcagttcaacaaaattgcctaccaacgattcttgcctactggacctgttgcaatgctgcccatgcctggcaaatatgctacattggtctggtctactactcccgagaaggccgcccttctcaagagccttagccccaaaaacttcattgccatggtcaatgctgctttccggctgagccctgtcgatatcggctttatgcacactcagcaggacagccaggcagaagagctatcatggcgcctacagcacacaagcttcgatgcagaggctcttccacagactgtcgttggtgtgcagcagggcagcatcgcatatttccccctgaagctgcgacatgccgacacatataccggcgaacgtgttgcacttgttggagatgcggcccatactattcatccattggcaggccaaggtttaaaccaaggccaaggagatgcccagagtctggtcaagaccatcgagtttgctgtctctcacggccaggatcttggtgcccaactctctcttgagtcttacaacagtgagcggtacgcagccaaccacatcattctcaatgtatgtgataagcttcacaagctttactccgtcgagagtggccccctggtgccgctgcgttcggttggtctaagagctgtcaatgctctcggccccctgaagaacttctttatggagcaggcctctgggaccggcacaaaaatcttgtaa

SEQ ID NO: 7327 - protein, 517 aa, Gibberella zeae PH-1
MTIDSAVVCGNSNQLQVMSFAGLKHRPQGTMLARRSALVQPGFVCRTCARQYQSQLRRASTSTQDNIYDVVCVGGGPAGLSLLTALRANPITAGLRVALIEAQDLSKISSFSLPPTQFSNRCSSLTPASAQYLDKIGAWRHLQRDRVQDYQEMQVWDGVTGARIEFDWPPSTTGDKTIAYMTENLNLTSGLLKRLHELGGVDIFDKTKVEGIDLGKETEDLDLSEWPVVQLSNGQSLAARLLVGADGANSPVRTFAGINSRGWDYGRHGVVATLELEGEGWGGQFNKIAYQRFLPTGPVAMLPMPGKYATLVWSTTPEKAALLKSLSPKNFIAMVNAAFRLSPVDIGFMHTQQDSQAEELSWRLQHTSFDAEALPQTVVGVQQGSIAYFPLKLRHADTYTGERVALVGDAAHTIHPLAGQGLNQGQGDAQSLVKTIEFAVSHGQDLGAQLSLESYNSERYAANHIILNVCDKLHKLYSVESGPLVPLRSVGLRAVNALGPLKNFFMEQASGTGTKIL

SEQ ID NO: 7328 - DNA, 1425 bp, Apis mellifera
  CDS (1)..(1425)
atggcgacttttggaaaagcaatgacattttgtgatgtattagcattaactttaaaaagatgtattatttctaatggatcaatgcttccagcaaagcctttttctatctctacacaaaatcatgaaaattatgatattattattactggaggtggtatggttggatctacattggcatgtgcaatagcaaataatagaaaacttgaatgtaaaaagattctcttattagaaagtaataaacaacatgaatataaatcacaagaaaaatattccaatcgtgtagttgctttaaataaacaaacacgttgcttactttcaagtataggagcttggcaacatattgaagcaatacgttattctacagttcgaaaaatgcaggtttgggatgcatgttctgatgctatgattgtatttaatgaagattatttgactgaagaaattgcttacatagttgaaaatgatttattattacatgctgtaaataaacaattggcagacaaagaaaatgtaaatataatttataattccaaagttgaaaatattaaattacctaaaacacaagaagaagatgcagtaatacaattacaagatggaacgaaatataaaagtaaattattaataggagcagatggtgtaaattcattggtacgtaaaacaatgaatacacaatatgtgaaatgggattacaatcaaatgggtatagttgctactcttaaattatcagagcccggtgaaaatgttgttgcatggcaaagatttctaccaagtgggccaatagcattacttccattaacaaatgaccttagttctcttgtatggtcattgccaatagatgaagcaaaaagacttttaaaagtttctgaagaagaatttgttgataatataaataatgctttatggaaagtttatccaaaagatggtatagttgaaagtggtatgaaagcgcttcaacaattacttgaaggtttgtccttacaaactggtgtagtaagacaattacaaccatcaatatcaactatttccgaaggatctcgtgcagcttttcctttacaatttggtcattctgtatcttatgttcaaacaggaactgttttagtgggagatgcagcacatagagttcatccattagctggtcaaggtgtaaatttaggatttggagatataacagtattagttcaacttcttgcagaagcagttataagtggagttccaataggaaacatgatgtatttgagaaaatatgaaacattaagacagcgatataatgttccaataatgtttgctattgatgcattgcatcgattatataatggaacagcagctcctattgtcttagttcgaagtttgggactacaattgacaaatgctatcccagtgataaagaaagccctaatagaacatgcatctggacaaatagaaacttga

SEQ ID NO: 7329 - protein, 474 aa, Apis mellifera
MATFGKAMTFCDVLALTLKRCIISNGSMLPAKPFSISTQNHENYDIIITGGGMVGSTLACAIANNRKLECKKILLLESNKQHEYKSQEKYSNRVVALNKQTRCLLSSIGAWQHIEAIRYSTVRKMQVWDACSDAMIVFNEDYLTEEIAYIVENDLLLHAVNKQLADKENVNIIYNSKVENIKLPKTQEEDAVIQLQDGTKYKSKLLIGADGVNSLVRKTMNTQYVKWDYNQMGIVATLKLSEPGENVVAWQRFLPSGPIALLPLTNDLSSLVWSLPIDEAKRLLKVSEEEFVDNINNALWKVYPKDGIVESGMKALQQLLEGLSLQTGVVRQLQPSISTISEGSRAAFPLQFGHSVSYVQTGTVLVGDAAHRVHPLAGQGVNLGFGDITVLVQLLAEAVISGVPIGNMMYLRKYETLRQRYNVPIMFAIDALHRLYNGTAAPIVLVRSLGLQLTNAIPVIKKALIEHASGQIET

SEQ ID NO: 7330 - DNA, 1434 bp, Candida glabrata CBS 138
  CDS (1)..(1434)
atgttgaagatgcaattgagttctgtcaggtacttagctaccatagctaaaaactcaacccccaaattgaccgatgtcctcattgtaggtggtggtcctgctggtcttacgcttgctgcagcaatcaagaattctccaactttagccggtctttcaactacgttagtagacgctggggatttgaagaaagttggggaatttcacgaccaaccaccagagcatttcaccaatagagtcgttagtataactccaaagtctctgcatttcattgccgaaagggctggtgctggtgatttcttactaagggacagaatccaaccttatgatggtttatatgtcaccgatggtgtcaccaagtctttgctcgatttggaaaagccctctatgttggaaatgattgaaatcttgaacatccaatcaagtttactcaagaaattatcgcagtatgatgaagtacttgatggatttaagcttgtggaaaaatctaaagtcactaagattgaaaacaccgatcctaaagacccaacttcatggccattagttactcttgataatggtgatgtttacaaaaccagattactagtcggtgctgacggattccaatcaccagtaagaaaatttgcaaatattgaaactcgtgggtggttctatggtacttttggtgttgttgctacaatgaaactacaatacgacacatataagctaaggggctggcaaagatttctaccagatggtccaatcgctcatttaccattaccaggtgaaaatgcaactcttgtgtggactacaactgaaagaatttcaaagttgctattgacattggatccaaaggcatttgcctccttggtcaatgccgcttttgttcttgacaacaccgacttacaatattattttgatgagttggaagccggaaagatttcaacaaatgaactcattgaggatgttaaattcagaatggaccaagaattttcaaaactaagcgatgaaactatgatagacgaactctacccaccccaggttattgacataaagggtgacactagggccaggttcccactgaagatgacgcatgctgacaactactgttcgcatagggtggctttggtaggtgatgcagctcataccactcacccactagctggccaaggtttgaacatgggtcaaggtgatgtcgaagctcttgttgacgccttagagaaagctacacaaagaggtcaagatattggtgctctattgagcctggaaccattctgggctgagcgttacgctactaaccatgtgctactaaatatggccgataaactatacaaactttaccacactgattcagcacctgtagtagcattaagaagtcttggcctcgatttaaccaataacttcccacctgtgaagaactggattgtgaagactctgactgccgacactgaattttga

SEQ ID NO: 7331 - protein, 477 aa, Candida glabrata CBS 138
MLKMQLSSVRYLATIAKNSTPKLTDVLIVGGGPAGLTLAAAIKNSPTLAGLSTTLVDAGDLKKVGEFHDQPPEHFTNRVVSITPKSLHFIAERAGAGDFLLRDRIQPYDGLYVTDGVTKSLLDLEKPSMLEMIEILNIQSSLLKKLSQYDEVLDGFKLVEKSKVTKIENTDPKDPTSWPLVTLDNGDVYKTRLLVGADGFQSPVRKFANIETRGWFYGTFGVVATMKLQYDTYKLRGWQRFLPDGPIAHLPLPGENATLVWTTTERISKLLLTLDPKAFASLVNAAFVLDNTDLQYYFDELEAGKISTNELIEDVKFRMDQEFSKLSDETMIDELYPPQVIDIKGDTRARFPLKMTHADNYCSHRVALVGDAAHTTHPLAGQGLNMGQGDVEALVDALEKATQRGQDIGALLSLEPFWAERYATNHVLLNMADKLYKLYHTDSAPVVALRSLGLDLTNNFPPVKNWIVKTLTADTEF

SEQ ID NO: 7332 - DNA, 1419 bp, Kluyveromyces lactis NRRL Y-1140
  CDS (1)..(1419)
atgttgtctagccggattttgagcaggtctttttttgcgtctgctgttaaccttcaagctaagttaacagatgtgcttattgttggcggtggtcctgccgggttgacattggctgctgctatcaaacaatctccccacttatcggatctatcaactgtattggtcgatgcaggtgatttgaaggaaaaaataggcggtttctaccatgatccaccagacaatttcaccaatagagtgatcagtttaacaccccaatctaagcacttcttagagaatactgttggggtatcgttgatggaagagagaattcagccctttgatggtctatacgttacagatggatgctctaatggtactttagagatggaacgggattcaatggggtttatggttgaaatcttgaacattcaaagttcgttgttggcgaaactacgttcaagtaatgcaccaaatttggatcttattgacaaaacaaaagtccaaagtattgaatatgaagatcccgaagatactaaatcatggccggtggtgaccctagacagtggggaacaatataagacacgcttgttgataggtgccgatggattcaacagtccagttcggaaattttctgggattgagtcaagaggctggttttacgagagattcggagtcgtagctaccttgaaactagaatatcctccgttcaaaattagaggatggcaaagattcttaccaactggaccagtggctcatcttccattaccaggtacgaactctacgttagtttggagtaccactgaaccattatcaagattgttattatctttggatgacgacgtatttgtggccttggtcaacgcagcgttcatcttggaggacgttgatctcgaatattactataagtccttacaggagggaactattacgggcgaagaattgattcaagatgttgacttcagaatcaatgagaaatttaattcattcaaagacgactctgtcatcgacgaaaaatacccccctaaggtgattgacatcttggataaatcaagagggagattcccactaaaactctctcatgctgacacatatgtcgctgaaagaattgcccttgttggcgatgcagcacatacgacacatccattggcaggtcaaggcttgaatatggggcaaggtgatgtggagtctctcattaaagcattggaaaaggctagacaaagaggattagacattggttctctgttggctttagaaccgtactgggcagaccgctatcctaccaacaacatgttactaggtgtggtagacaagctacataagctatactctacagatttcggtcctctagtttccttgagaacgtttggcttaaatttagtcaacagcttacaacctttgaaagatctgatggtaggaaaagttagcggaccaagtaaatag

SEQ ID NO: 7333 - protein, 472 aa, Kluyveromyces lactis NRRL Y-1140
MLSSRILSRSFFASAVNLQAKLTDVLIVGGGPAGLTLAAAIKQSPHLSDLSTVLVDAGDLKEKIGGFYHDPPDNFTNRVISLTPQSKHFLENTVGVSLMEERIQPFDGLYVTDGCSNGTLEMERDSMGFMVEILNIQSSLLAKLRSSNAPNLDLIDKTKVQSIEYEDPEDTKSWPVVTLDSGEQYKTRLLIGADGFNSPVRKFSGIESRGWFYERFGVVATLKLEYPPFKIRGWQRFLPTGPVAHLPLPGTNSTLVWSTTEPLSRLLLSLDDDVFVALVNAAFILEDVDLEYYYKSLQEGTITGEELIQDVDFRINEKFNSFKDDSVIDEKYPPKVIDILDKSRGRFPLKLSHADTYVAERIALVGDAAHTTHPLAGQGLNMGQGDVESLIKALEKARQRGLDIGSLLALEPYWADRYPTNNMLLGVVDKLHKLYSTDFGPLVSLRTFGLNLVNSLQPLKDLMVGKVSGPSK

SEQ ID NO: 7334 - DNA, 1479 bp, Debaryomyces hansenii CBS767
  CDS (1)..(1479): transl_table=12
atgcttttaaaatcatttgctagatcactagcaacagctgcgtctatcagctctccaaagtttcaggacgtagtagtaataggtgggggaccagctggattatcgttgttagcagctttgaaaaattctcataagacgaaacatttaaaatgtacattggtggaagggtcgagtttagaatctgttcgtgactttggtataaacccaccggatgagtataccaacagagttgtttcattgacccctaaatccgtagaattcatgcaagaaaaaattggaaattgggactacatagaccaggacagaatcaagttctatgataatattgtcgcttatgattcccaagataaagaatcacgtataagatttgatggaagtagcgttggtgttggtgttttggcggcaatgtgtgaaaatgtaaatattcaaagttcattgatatcgaagattgacgacttaaatgacaatattaaggatccaagcattgagcaagaagctgttatattagataatactaaggttgttgaaattattaatccgaaagaagaaaatacccatgaactattggaaaacgacccagaagcaggcaacccagaaatcgactggccaattgtcaagctttcgaatggagatgttttacaaacaagattattagtgggtgcggacggttttaactctcctgttcgtaaattttcccatatcccatctaggggttggtcgtataatagattcggtgtcgtagccactatcaaacatcaatatgaagactaccggtcaattgcatggcaaagattccttacaaccggaccacttgctattttgccattaactgaagacaatgctactattgtttggtccaccacccctgagttgtctgaattatttttaaaggtggatgaagagatcttccctcacttgattaacgcagccatgaccttatctgaggttgatttgaattatatttatgaacaattgaagaaagatccaaatgacaagtcagttcttgaggacatagagtggcgtatgtcgaaaataaagctctctattttggaagaaaaatatccgttacaggttactacagtggtggagaactctagagctagatttccattgaaattatcccatgctgatacatatgcaattcctcgtattgcattaattggagacgctgctcacactgttcatccattagcgggacagggtttgaatatgggacaatcagatgtagcatgtttactcgaggctcttgaagatggggtgaacagaggccttgacattggttcaacattagtgttggaaaattatactgctaatgcatggcctgccaatcatgtattgatgggtgtttgcgataaattgcataaaatattttcaactgattggttccctattgtcttccttagaggttttggtatgaaatcgttaaatatagtcgatactgccaaagatttaatgataaaggctatcagtggtagatag

SEQ ID NO: 7335 - protein, 492 aa, Debaryomyces hansenii CBS767
MLLKSFARSLATAASISSPKFQDVVVIGGGPAGLSLLAALKNSHKTKHLKCTLVEGSSLESVRDFGINPPDEYTNRVVSLTPKSVEFMQEKIGNWDYIDQDRIKFYDNIVAYDSQDKESRIRFDGSSVGVGVLAAMCENVNIQSSLISKIDDLNDNIKDPSIEQEAVILDNTKVVEIINPKEENTHELLENDPEAGNPEIDWPIVKLSNGDVLQTRLLVGADGFNSPVRKFSHIPSRGWSYNRFGVVATIKHQYEDYRSIAWQRFLTTGPLAILPLTEDNATIVWSTTPELSELFLKVDEEIFPHLINAAMTLSEVDLNYIYEQLKKDPNDKSVLEDIEWRMSKIKLSILEEKYPLQVTTVVENSRARFPLKLSHADTYAIPRIALIGDAAHTVHPLAGQGLNMGQSDVACLLEALEDGVNRGLDIGSTLVLENYTANAWPANHVLMGVCDKLHKIFSTDWFPIVFLRGFGMKSLNIVDTAKDLMIKAISGR

SEQ ID NO: 7336 - DNA, 1398 bp, Yarrowia lipolytica CLIB122
  CDS (1)..(1398)
atgcttcgatccacgaccttgcaacggctgcggccggctgtttttcgagtccagcgatggaactccaccaccacatctgctcccaaaccctccaccacccactcggacattgtggtggttggaggaggtcctgccggcttgaccattgccgctgccctcaaacactaccctgagacggtcaacaagtctgtgactcttgttgagtttgggtctctggacaatctgaagacctggggccccgatatggagcggtttgagaaccgagtcagttctctgaccccctcttcggtcgagtatctgaccaagatcggcgtgtgggaacatgtcaaccgagaccgagttcaggcctacagacacatgacagcgtgggatggagtgtcgggctctaaggtgcagttcaacaccacccaattgatgggcgagggccgagatatcgcctacatgaccgaaaacttcaacctgcagaacggcttgctcaagcagctggcaaataagcccaatctgacgatcctggacaagaccaaggtggagggcgttgagcgaacacccgaatcgcacaacaagccccttgtcaagctctccaatggttctactatctctactgatctgctgatcggtgctgatggagccaactctcctgttcgaaccttttccggtatcgaggcacgaggatgggactacaacacccacggtctggttgccaccgtgcgtctggccaacgagcagcagtcggcatggcagcgattcctccccaccggtcccattgctcttcttcctctgcctaacagattcggctcgctcgtctggtccaccacccccaagatggccgcccagctcaagcagctgactcccgagcagtttgtcatgatggttaactgtgcattcaacctcgagcccaccgacattgagtacctggttgaacatcccgatgaaatcatgactgacgctccttacagactgtctcagcgatcttctaaccccgacgtgccctgccccattgttgctgtccaagacaagtcgcgagcctccttccctcttaagatgaagcatgccgacacttatattgccgagaacgtggctctggttggagatgctgcccacaccacccatcctctagcaggacagggtctcaacatgggccagggagacgcccagagtctggccattgccattcgaaacgctgcggggcgtggagccgatattggatccaccctgaccctggagccctactgggccgaccagtactttaagaaccacaagctgctgggcgtggtcgacaagctgcacaagttgtactcgacccgaaacccgctggtggttggtctgcggtcgttgggtcttgatgcggtcaatagtgtcaagcccgtgaaggatttcttgatgtctcaggcgtcgtaa

SEQ ID NO: 7337 - protein, 465 aa, Yarrowia lipolytica CLIB122
MLRSTTLQRLRPAVFRVQRWNSTTTSAPKPSTTHSDIVVVGGGPAGLTIAAALKHYPETVNKSVTLVEFGSLDNLKTWGPDMERFENRVSSLTPSSVEYLTKIGVWEHVNRDRVQAYRHMTAWDGVSGSKVQFNTTQLMGEGRDIAYMTENFNLQNGLLKQLANKPNLTILDKTKVEGVERTPESHNKPLVKLSNGSTISTDLLIGADGANSPVRTFSGIEARGWDYNTHGLVATVRLANEQQSAWQRFLPTGPIALLPLPNRFGSLVWSTTPKMAAQLKQLTPEQFVMMVNCAFNLEPTDIEYLVEHPDEIMTDAPYRLSQRSSNPDVPCPIVAVQDKSRASFPLKMKHADTYIAENVALVGDAAHTTHPLAGQGLNMGQGDAQSLAIAIRNAAGRGADIGSTLTLEPYWADQYFKNHKLLGVVDKLHKLYSTRNPLVVGLRSLGLDAVNSVKPVKDFLMSQAS

SEQ ID NO: 7338 - DNA, 1575 bp, Aspergillus nidulans FGSC A4
  CDS (1)..(1575)
atgcggccattatctgcttatgccctgcggccgtacgtctgtccttcgtgccgatctgcgcgtatcctgaatcggcggagattcggctcggaacatgcgccggtaacggatatatacgatgtagtctgtgttggaggtggtcctgccggtctggcactgctggctgctctccaatgggctcacgatatactgataagacggacaggcgcatccccagcaacgtcgaagttaaaggtcgccctcgtggaatcgcaggacctagacaaagcccgctcgtggaagctcgatccgcaccagttttccaaccgcgtcagcagcctcacgccctcgtccgtgtcatttctgcagaagatcggtgcttgggatcacttggatgtctcacggacgcagccctaccaggctatggaagtgtgggatggagagaccgggtccaagatttcgttcgactggtccatggaaacctcgccgtttgaggacctccgcaccgtcgcgacgatgacggagaacgctaacctcgtgcacgcgctgctctcgcggatcgctgcgtctggggatgaaaatctttccatgttctctcgatcaacagtctcctcgattgaaaacggcgcggcgaatgggcccaatggcgcggatctctcggcgtggccggttctttccatcgcaccggctgggtctgagagctcgaatgcgccagcttcccgaatcgccgctcgactcctagtcggagcggacggcattaacagccctgtccgccggtacgccgacatcaccacagacggctgggactaccagcgccacggcattgtcgcaaccctctccctcgccgaccatatccctcctccgttccccatcggcacgcggacagcataccagcgcttcctgcctgccctcggtggcccaatcgcccttctcccgctcccaaacaacaacgctacccttgtctggtccacgacggtcgaaaacgcagcttacctcaagtccctatcgccgggagccttcattgccatggtcaacgccgccttccgcctgggcatgccagatttacagtacatgatgcgcatggagcgcccctcgtcctcgtcggtcacgaacctcgacgaagacctgcacgagagcgaactcacttggcgcctacagcacactccatccccctctcatctccctccaatggtcacaggcgtgcaagaaggcagcgtcgcctcattcccgctacgtttccgccatgcgtcaacgtacatctcaccgcgcgtagccctagtcggcgacgctgcgcacgtcatccaccctcttgccggccagggcctaaacctcggcctgggcgatgtggcctccctctccagaacaatcgagtacgctgtgacgcatgggatggacataggcgatatcctcacgctcgagagatatacggctgagcggtacgccacgaacgcaaagatcggtggcacctgcgatgtcctgcacaagctttataacgtgcccggccaggggcctgttgcgtgggggcggagtctgggatttgagatcattgaccgagtaccctttctgaaggggtttctgatgaggaacgcggattaa

SEQ ID NO: 7339 - protein, 524 aa, Aspergillus nidulans FGSC A4
MRPLSAYALRPYVCPSCRSARILNRRRFGSEHAPVTDIYDVVCVGGGPAGLALLAALQWAHDILIRRTGASPATSKLKVALVESQDLDKARSWKLDPHQFSNRVSSLTPSSVSFLQKIGAWDHLDVSRTQPYQAMEVWDGETGSKISFDWSMETSPFEDLRTVATMTENANLVHALLSRIAASGDENLSMFSRSTVSSIENGAANGPNGADLSAWPVLSIAPAGSESSNAPASRIAARLLVGADGINSPVRRYADITTDGWDYQRHGIVATLSLADHIPPPFPIGTRTAYQRFLPALGGPIALLPLPNNNATLVWSTTVENAAYLKSLSPGAFIAMVNAAFRLGMPDLQYMMRMERPSSSSVTNLDEDLHESELTWRLQHTPSPSHLPPMVTGVQEGSVASFPLRFRHASTYISPRVALVGDAAHVIHPLAGQGLNLGLGDVASLSRTIEYAVTHGMDIGDILTLERYTAERYATNAKIGGTCDVLHKLYNVPGQGPVAWGRSLGFEIIDRVPFLKGFLMRNAD

SEQ ID NO: 7340 - DNA, 1443 bp, Candida albicans SC5314
  CDS (1)..(1443): transl_table=12
atgatttcgagatttgtcagaactttagcaacgtcggccaagtttcaggatgttgtgatcattggaggaggacctgcaggtttaacgttactagcagcattgaaaacttcccccaaaactaagcatttgcaatgtacacttattgagggttcttcattggacaatgttcgaaaatttcataacgatccaccagcagactatacaaatcgagtgatttctcttactccaaaatcaattgaatttatgcagaataaagttgggagttgggattttatccatgaagacagagtaaaagcgtatgatgggatcatagcttatgattcacaagacgcaaactcgagaattgagtttgatattagtacaatcggacaaagcacgttagcagcaatgtgtgaggttattaatatacagagctcattgttggctaaaattgaaagcctccaagataaatcaactaccattaaggataacaccaaggttgtggagattgttaacccaatagaaccagatttggataatcacaacttgactgaaatagataccaatgttagtgatcctaaattggattggccaattgtcaaactagaaaacggagaaacaatacaaacgcggttattggtgggggcagacgggtataattctcctgtgcgtaaatatgcccatattgagtcaagaggctggcaatacaatacctttggtgttgttgctacagtgaaattgcaatacgaagatttcagagcagtgggatggcaaaggtttttgactacaggccccttggctatcttaccgttaagtgaagacaatgccactattgtttggtccagcactccggaattagctgacttgcttttgaaagtaaatgaaaaaatattcccacatcttgtaactgctgcaatggtgttggaagaagttgacttgaactacatttacagtgtgttgcaagaagatccaaatgatttttctgtattaaaggacattgaatggcgattatccaaattcaatcccgaagaattggaagaacgatacccattaccagttgttgatgtattgagtggctcccgtgctagattcccattgaaaatgtctcatgctgatacttatgttgctccaagagtagcattagtcggagatgctgcacatacgatacatccattagctggtcaaggattgaacatgggacaatcagacgtggctgctttggttgaagctttggaaaaagggattgatcgaggtatggatatcggttcaactttggttttagaaaattacgttgctaatgcttggccctcaaatcatgccttgctaggcatctgcgataaactacacaaaatattctcaactgatttttacccgttggtgtgggcaagaggatttgggatgaaatctataaattcatttggtgctattaaagagttaatgatgaaaagcatcagtggaagatag

SEQ ID NO: 7341 - protein, 480 aa, Candida albicans SC5314
MISRFVRTLATSAKFQDVVIIGGGPAGLTLLAALKTSPKTKHLQCTLIEGSSLDNVRKFHNDPPADYTNRVISLTPKSIEFMQNKVGSWDFIHEDRVKAYDGIIAYDSQDANSRIEFDISTIGQSTLAAMCEVINIQSSLLAKIESLQDKSTTIKDNTKVVEIVNPIEPDLDNHNLTEIDTNVSDPKLDWPIVKLENGETIQTRLLVGADGYNSPVRKYAHIESRGWQYNTFGVVATVKLQYEDFRAVGWQRFLTTGPLAILPLSEDNATIVWSSTPELADLLLKVNEKIFPHLVTAAMVLEEVDLNYIYSVLQEDPNDFSVLKDIEWRLSKFNPEELEERYPLPVVDVLSGSRARFPLKMSHADTYVAPRVALVGDAAHTIHPLAGQGLNMGQSDVAALVEALEKGIDRGMDIGSTLVLENYVANAWPSNHALLGICDKLHKIFSTDFYPLVWARGFGMKSINSFGAIKELMMKSISGR

SEQ ID NO: 7342 - DNA, 1392 bp, Strongylocentrotus purpuratus
  CDS (1)..(1392)
atggtgaccatgaacaaagtcgactctgtgccgaagaagacgagacctgtcgtcggaagctggcagacgacatccgaagatgagctgtatgatgttgttatcgttggaggaggaatggcaggccaggcaatggcttgtgctttgggttttgaaccatctcttggtgatcatagaatcctattgttggagcagggtaagagacctatgcagttgaacgagcttccatccaagtacagcaacagagtttgttccctcaaccataactcagtcaagctacttacagatgtgggggcgtggcatcacatggctgagatgcgagtcaaaccattcaggaggatgcaggtttgggatgcctgctccgacgccctcatcgcattcaacaagtcagctgacctctcacaagacatggcttacattgtggaaaatgacgtcaccaacgctgccctctccaggcagcttgcggagagaggaaatgttgaagtgcagtatgaaaagagactgacctctatccagatcccaccgcaggggctgtttgaagaggagagctgggctcagctccacctggatgatgatagtatcattaagaccaggctgatcataggagcagacggagccaggtctggggtgaggaagctagctggactgaaggagataggatgggactatgatcagtggggcgtggtggctacgctgcagctggcagagctaactgagaacattgtagcatggcagagatttctgccttcagggcctattgcattgctgccattgactgatgatcagagttctttagtatggtcaaccagtaaggaacattccaaggagctagtcaacatggatgaacaggacttcacagaagctgtcaacaatgctttttgggatgatagccaccacaaccagtctgtagatgctgccactcagctcttcgagggtttgctgtcagctatcaaacctgatgggtcatctatccgacagctccctcccagtatcgcaggggttgatgcgagcagtagagcctcctttccccttggattgtgccatgcaccgagatacatcacggacagggtggctctaattggagatgcagctcatagagtacacccacttgcaggccagggtatcaaccttggttttggtgatgtcacatcccttacacaagtcttgtcagaagctgcctcaatgggaaaagatctaggttccgtatctcatctggaggagttcgagacacagcgccagcgccacattctccccgtcatgggtaccatagatgctctcaagagactctactctaccgataaccctgctgcagtactcatcaggagtctgggtttgcaggccaccaatgctctgggacccctcaaagatcgcatcattgcttcagctgccacttga

SEQ ID NO: 7343 - protein, 463 aa, Strongylocentrotus purpuratus
MVTMNKVDSVPKKTRPVVGSWQTTSEDELYDVVIVGGGMAGQAMACALGFEPSLGDHRILLLEQGKRPMQLNELPSKYSNRVCSLNHNSVKLLTDVGAWHHMAEMRVKPFRRMQVWDACSDALIAFNKSADLSQDMAYIVENDVTNAALSRQLAERGNVEVQYEKRLTSIQIPPQGLFEEESWAQLHLDDDSIIKTRLIIGADGARSGVRKLAGLKEIGWDYDQWGVVATLQLAELTENIVAWQRFLPSGPIALLPLTDDQSSLVWSTSKEHSKELVNMDEQDFTEAVNNAFWDDSHHNQSVDAATQLFEGLLSAIKPDGSSIRQLPPSIAGVDASSRASFPLGLCHAPRYITDRVALIGDAAHRVHPLAGQGINLGFGDVTSLTQVLSEAASMGKDLGSVSHLEEFETQRQRHILPVMGTIDALKRLYSTDNPAAVLIRSLGLQATNALGPLKDRIIASAAT

SEQ ID NO: 7344 - DNA, 1176 bp, Klebsiella pneumoniae subsp. pneumoniae MGH 78578
  CDS (1)..(1176): transl_table=11
atgacaattcacgtaacagatgtcgccatcgtgggcggcggcatggtcggcggcgccctggcgttagggctggcgcaacagggatttaccgtgacggtgcttgagaaagcggcgccaccggcgttcgatccggcatccgccccggatgtgcggatctcggcgatcagcgcggcttcggtcggcctgctgaagagtctcggcgtctgggatgccatacgggcgatgcgcgtccatgcttatcgccgtctggagacctgggagtgggagagcgcgcacgtcgccttcgacgccgcggagctcaagctgccggagctgggctatatggtcgagaacaaggttctgcaatggggcctgtggcaagcgctggcggcgcatgaggcggttaccctgcgcgtcggtagcgaactgaaaacgatgcagcgcggcgagacgcagacggcgttgcatttgcgcgagggggagacgatccacgcccggctggttatcggcgccgacggcgctaactcccaggtgcgggagatggccggcatcggcgtgcacgcctggcaatatcagcagtcctgtatgctgatcagcgtcgaatgcgccgacgatcccggcgacagcacctggcagcagtttactcccagcggcccgcgcgccttcctgccgctgttcgaccactgggcctcgctggtctggtacgacgccccggcgcggatccgtcagctgcagagcatgaccatggcgcagctccagcaggagatcgccagtcactttccggcgcggctgggacgggtgacgccgcaggcggccggcgccttcccgctcacccggcgtcatgcgctgcagtatgttcagcccggcctggcgctggtgggcgatgcggcgcacaccattcatccactggcggggcagggggttaaccttggctatcgtgatgtcgatgccctgctggagatcctggcggaagtgcgcggccgcggcgaagactgggccagcctgccggtgctgaagcgctaccaggcgcggcggcgagcggataattttatcatgcagtcggggatggacctcttttatgccggtttcagcaatgacctggcgccggtgcggatgctgcgtaatattggcctgatggcggctgaacgcgccggggtgctgaagcgtcaggcgctgaagtatgccttaggcttgtaa

SEQ ID NO: 7345 - protein, 391 aa, Klebsiella pneumoniae subsp. pneumoniae MGH 78578
MTIHVTDVAIVGGGMVGGALALGLAQQGFTVTVLEKAAPPAFDPASAPDVRISAISAASVGLLKSLGVWDAIRAMRVHAYRRLETWEWESAHVAFDAAELKLPELGYMVENKVLQWGLWQALAAHEAVTLRVGSELKTMQRGETQTALHLREGETIHARLVIGADGANSQVREMAGIGVHAWQYQQSCMLISVECADDPGDSTWQQFTPSGPRAFLPLFDHWASLVWYDAPARIRQLQSMTMAQLQQEIASHFPARLGRVTPQAAGAFPLTRRHALQYVQPGLALVGDAAHTIHPLAGQGVNLGYRDVDALLEILAEVRGRGEDWASLPVLKRYQARRRADNFIMQSGMDLFYAGFSNDLAPVRMLRNIGLMAAERAGVLKRQALKYALGL

SEQ ID NO: 7346 - DNA, 1179 bp, Klebsiella pneumoniae subsp. pneumoniae MGH 78578
  CDS (1)..(1179): transl_table=11
atgagcgtgctgatcgtcggcggcgggatgaccggggcgacgctcgcgctggccatctcccgtttgaccggcggcgcgctgccggtccacctcattgaagcgcaggatccgcattcttcacgccaccctggctttgacgaccgggcgatcgccctggctgcgggcacctgccagcagctggcgcgtatcggtatctggcaacgcctcgccgaacgcgcgacgcccatccagcgagtacacgtcagcgaccgcggtcatgccgggtttgtgaatctggcggccgcggattatggcctgtcggcgctgggccaggtggttgaactccacgatgtcggccagcggctgtttggtctgctgcgcgaggcgccaggcgtcacgctgcactgtccggcgaaagtggaagcggtcagtcgcagccaggagagcgtcagccttacgcttgagggcggcgaaatcattaacggtaagctgctggtggcggcggacggttcccgttcggcactgggcgcccgctgcggcatcagctggcagcagcagccgtatgagcagatagcgatcattgctaacgtcagcaccgcgttgccccacgaaggtcgcgccttcgagcgctttaccgagcatggcccgctggcgatgctgccgatgtcgcaagggcgctgctcgctggtgtggtgtcatccgcagtcgcgccgcgatgaggtgcagagctggtctgacgaacgcttttgtcaggagctgcagcaggcgttcggctggcggctggggcgtattacccacgccgggaagcgcagcgtttatccgctggccctcaccaccgccagccgcgcggtgtcgcaccgcctggcgctggtcggcaacgcggcgcagacgctgcacccgatcgccgggcagggctttaatctcggcctgcgcgatgtgatgagcctggcggaattactcgctgacgcccatctcagcggcgaagatgtcggtcattatccactgctgtgccgctatcaggcgcgcagggcaggggataaagccgccaccatcggcgtgaccgatgggctggtgcatctgtttgccaaccgttgggcgccgctggtggcggggcgcaacgtcggtctgatggcgatggaattatttaccccggcgcgcgatgcgctggcgcagcgtaccctcggttgggttccccgttaa

SEQ ID NO: 7347 - protein, 392 aa, Klebsiella pneumoniae subsp. pneumoniae MGH 78578
MSVLIVGGGMTGATLALAISRLTGGALPVHLIEAQDPHSSRHPGFDDRAIALAAGTCQQLARIGIWQRLAERATPIQRVHVSDRGHAGFVNLAAADYGLSALGQVVELHDVGQRLFGLLREAPGVTLHCPAKVEAVSRSQESVSLTLEGGEIINGKLLVAADGSRSALGARCGISWQQQPYEQIAIIANVSTALPHEGRAFERFTEHGPLAMLPMSQGRCSLVWCHPQSRRDEVQSWSDERFCQELQQAFGWRLGRITHAGKRSVYPLALTTASRAVSHRLALVGNAAQTLHPIAGQGFNLGLRDVMSLAELLADAHLSGEDVGHYPLLCRYQARRAGDKAATIGVTDGLVHLFANRWAPLVAGRNVGLMAMELFTPARDALAQRTLGWVPR

SEQ ID NO: 7348 - DNA, 1293 bp, Xanthobacter autotrophicus Py2
  CDS (1)..(1293): transl_table=11
atgaccgggctgaccatgtccgagcctcaggccgagatgccgcacgccggagccggctttgccgccaccgcggccgcgccgcgtgcggacgtggccatcgtcggtggcgggctcgccggcctcagccttgcgctcgccctgcgccaggggctggggcctgatgccgacatcgtgctgttcgacccctatttgtcccacgccacggtggatgacggccgctgctcggccatcgccgccggtgcgcggcgcatgctcaccaccctcggtgtgtggcagcacgtgggtgccaaggcccagcccatccaggccatggtggtcaccgacagccgcaccaaggacgtggcgcgccccaccttcctgaccttcgacggcgatgtggagccgggcgaggccttcgcccacatggtgcccaacgccgacctgcagtacgccctcatcgatgcggcgcgctccgccggcatcgacctgcgcgcccagtccgtggacgatttcaccgccgaccgttccggcgtgagcctttccgccgccggggcgccgacgcttcgggcccagcttctggtggcttgcgatggcgccaagtcgcgcatccgcggcatggccggcatcgccaatgtggcctggggctatggccagagcggcatcaccttcgcggtggagcacgaacggccccacgagggccgggcggaagagcattttttgccccccggcccgttcgccatcctgcccttgccaggcaaccgctcctccatcgtgtggaccgagcgcacggaggatgccgagcgcatcgtgggactgccgtccatcgtcttccaggaagagctggagcagcgattcggccaccggctcggctgggtgaagccggtgaccaagccgcgtgcctatcctttgggcttcgccatggcgcgcagcttcatcggcgagcgcctcgctttggtgggggatgcggcccatctcatccaccccattgccgggcaggggctcaacatgggcctgcgcgacgtggcggcactggccgaggcggtgacggacgccgcgcgggtgggcctcgatttcgccgggccggcggtgctggagcgctatcagcgctggcggcggttcgacaccttggccatgggcgtcgcgacagacgggctcaaccggctgttctcgaaccgctccgacgccctgcgcgcggtgcgcgacctcgggctcggcctcgtggaccggatgccgcgcctcaagggcctgttcatccgcgacgcagcgggcctcaccgggcaggtgccgaagctgctgcggggcgaggcgctttag

SEQ ID NO: 7349 - protein, 430 aa, Xanthobacter autotrophicus Py2
MTGLTMSEPQAEMPHAGAGFAATAAAPRADVAIVGGGLAGLSLALALRQGLGPDADIVLFDPYLSHATVDDGRCSAIAAGARRMLTTLGVWQHVGAKAQPIQAMVVTDSRTKDVARPTFLTFDGDVEPGEAFAHMVPNADLQYALIDAARSAGIDLRAQSVDDFTADRSGVSLSAAGAPTLRAQLLVACDGAKSRIRGMAGIANVAWGYGQSGITFAVEHERPHEGRAEEHFLPPGPFAILPLPGNRSSIVWTERTEDAERIVGLPSIVFQEELEQRFGHRLGWVKPVTKPRAYPLGFAMARSFIGERLALVGDAAHLIHPIAGQGLNMGLRDVAALAEAVTDAARVGLDFAGPAVLERYQRWRRFDTLAMGVATDGLNRLFSNRSDALRAVRDLGLGLVDRMPRLKGLFIRDAAGLTGQVPKLLRGEAL

SEQ ID NO: 7350 - DNA, 1179 bp, Salmonella enterica subsp. arizonae serovar 62:z4,z23:--
  CDS (1)..(1179): transl_table=11
atgagcgtcattatcgttggcggcggcatggcaggcgcgacgctggcgctggccatctctcagttcagtcatgggacgttgccggtacatctgattgaagcgaaagcgcctgaagccgacggtcatcccggctttgacgccagagcgattgcgctggcggcgggtacttgccagcaactggcgcgaattggcgtctggcaggcaatttccgattgcgcaacggcaatcaataccgtacacgtcagcgatcgcggacatgccggatttgtgactctcgccgcgcaggattacagcctggcggcgttgggtcacgttgcggagctgcatgatatcgggctgcgtctgtttgcgctcttgcgtaaagcgccgggcgttacgctgcactgcccggagcgcgtagccagcgtgtcgcgtactcagcagcaggttaacgtcactctggaaaacggcaatgtgatagctggcagcgttctggtggcggctgacggtacccactccgcgctggcgtcagcctgcggcgttgactggcgtcaggagccttacgaacagttagcggtgatagctaatgtcgcaaccgccgtcccgcatcagggacgcgcctttgaacgttttaccccatatggcccgctggcgatgttgccgatgtcacaaggccgatgttcgctggtttggtgccatccgctcgaccagcacgatgaggtgctgggggggtctgacgtgcaattctgtcatgcgttgcaggccgcgttcggctggcggttggggcgcattactctggcgggtaagcgtagcgcgtatccgcttgctcttaccacagcgacgaaagcgtttactcaccggacggtactggtcggcaatgcggctcagacgctgcatcctatcgccgggcaagggtttaatcttggtctgcgcgatgtcatgagcctggcggaaacgctggtcgcggcacagaacgcgagcgaggatattggcgcctggcatgtgctatcgcgctatcaacagcgtcgtcaggtcgaccgggatacgacaattggcgtgacgaacagtctggtccatctgtttgcaaatcgctgggcgccgttggttattgggcgcaatgtcggtttaatggcgatggaattattaccgcctgcgcgcgatgcgctggcgcagcgtacgcttggctgggtagcgcgataa

SEQ ID NO: 7351 - protein, 392 aa, Salmonella enterica subsp. arizonae serovar 62:z4,z23:--
MSVIIVGGGMAGATLALAISQFSHGTLPVHLIEAKAPEADGHPGFDARAIALAAGTCQQLARIGVWQAISDCATAINTVHVSDRGHAGFVTLAAQDYSLAALGHVAELHDIGLRLFALLRKAPGVTLHCPERVASVSRTQQQVNVTLENGNVIAGSVLVAADGTHSALASACGVDWRQEPYEQLAVIANVATAVPHQGRAFERFTPYGPLAMLPMSQGRCSLVWCHPLDQHDEVLGGSDVQFCHALQAAFGWRLGRITLAGKRSAYPLALTTATKAFTHRTVLVGNAAQTLHPIAGQGFNLGLRDVMSLAETLVAAQNASEDIGAWHVLSRYQQRRQVDRDTTIGVTNSLVHLFANRWAPLVIGRNVGLMAMELLPPARDALAQRTLGWVAR

SEQ ID NO: 7352 - DNA, 1224 bp, Pseudomonas putida GB-1
  CDS (1)..(1224): transl_table=11
atggaaatgcgcgcagatctgttgattgtcggtgccggtatggtcggcagcgccctggccctggcgttgcgccacagtggcctgcaaatcctgttggtcgatggtggcccgctgacggtcaaacccttcgacgcccaggccccgttcgagccgcgtgtcagcgcgctgtcggcggccagccagcgcatcctcgagcgccttggcgcctgggaaggcattgcccagcggcgtgccacgccgtacaccgacatgcaggtgtgggatggcagtggaaccgggcagattcacttctcggcggccagcgtgcatgcccaggtgctcggccatatcgtcgagaaccgggtggtgcaggatggcctgctggagcgcctgcatgacagcgacatcggcctgctggccaatgcgcggctggagcaattgcgccgctctggcgatgagtggctgctgaccctggccgatggccggcaactgcgtgctccgctggtgatcgccgccgacggcgccaattcggcggtgcggcgcctggctggctgcgaaacccgcgagtgggattatctacaccatgccatcgtcaccagtgtgcgctgcagtgccgggcaccagggtacggcctggcagcgcttcaccgatgaggggccgttggctttcctgccgttggtccgcgatggccagcaggattggtgctcgattgtgtggtcgactaccccggaacatgccgagcagttgatggcgctggatgaagcggccttcctgcaggccctggaacgtgccttcgaggggcgcctgggccatgtgctgcaggccgaccctcgggtgtgcgtgccgctgcgccagcgtcacgccaagcgctatgtggatgagggcctggccttgatcggcgacgctgcgcacaccatccacccattggcggggcagggtgtgaacctgggcttcctggatgccgcggtgctggccgaggtgctggtcaatgcttgcgagcgtggcgagcggttggcggatgtgaaggtgttgagccgttacgagcggcggcgcatgccgcacaacctggcgttgatggcggccatggaagggttcgaacggttgttccaggctgatccgctgccgttgcgctggttgcgaaatagtgggttgaaactggtggagaagatgccggaggccaaggcggtgtttgtgcgccaggcgctgggtttgagtggggacctgccggatttggccaaggcttga

SEQ ID NO: 7353 - protein, 407 aa, Pseudomonas putida GB-1
MEMRADLLIVGAGMVGSALALALRHSGLQILLVDGGPLTVKPFDAQAPFEPRVSALSAASQRILERLGAWEGIAQRRATPYTDMQVWDGSGTGQIHFSAASVHAQVLGHIVENRVVQDGLLERLHDSDIGLLANARLEQLRRSGDEWLLTLADGRQLRAPLVIAADGANSAVRRLAGCETREWDYLHHAIVTSVRCSAGHQGTAWQRFTDEGPLAFLPLVRDGQQDWCSIVWSTTPEHAEQLMALDEAAFLQALERAFEGRLGHVLQADPRVCVPLRQRHAKRYVDEGLALIGDAAHTIHPLAGQGVNLGFLDAAVLAEVLVNACERGERLADVKVLSRYERRRMPHNLALMAAMEGFERLFQADPLPLRWLRNSGLKLVEKMPEAKAVFVRQALGLSGDLPDLAKA

SEQ ID NO: 7354 - DNA, 1212 bp, Synechococcus sp. PCC 7002
  CDS (1)..(1212): transl_table=11
atggaaaaatctcaccttgggtttgatgtgatcattgtcggtggcggtattgtcggggtcaccctcgcggcctgcctcaaacggacaaatctgcggattgccatcgtggaagcacaaccccttgatgtggtgacccaacggcagcgggcctatgcgatgtccctgctttcccagcggctttttcaggagttgggggtttgggaggtgatcgccgcccgtagtggcaaataccgcaatattcaattatcggacgaagatttttctggggtcgttagattctcccgccaggatctcaagactgattttcttgggttttcggggcagcaccaagttgttcttgaaactctccaggcttctctgcggggctatggcaatatccgctggttctgtccagcccaagtcaccgccattcactacgagtctgagcaggcgatcgtggagttatctagcgaaacccaggggcagatcaaaattcaaggggccttggtagttggagccgacgggccacgctctcttgtgcgccaaggagccagcattaaaacgaggggttggaaatattggcaatcctgtgtcacctgcgttgttgaacatgacgccccccgcaatgatgtcgcctttgaacggttttggggtacggggccgatgggagttttgcccctaaccgaaaatcgctgtcaaatcgtctggacaaatccccatgccgaagcccaacgcctgaaagaattacctccggaagttttcctagaatatttagaacaacacaccggcccccagctcggtcgcttaaaattgcttggcgatcgccaggtctttccggtgcaattgatgcaaggcgatcgttatgtggatcatcgtctcgcgttggtgggagatgcggcccattgttgccacccggtggggggccagggtctcaatttaggcatccgcgatgcggcggccctcgcccaaaccttgatcgaagcccagcaacggggtcaggatctaggaagtttggctgtgttgaaacgctatgaacggtggcgcaagcgtgaaaatctggtaattcttggctttacggatttcctcaaccgccttttttccaaccgcatttggcctgtggtctgggtgcgccgtctggggctgattgtgatggcaaaatttaatcccctgcgcctgtttgcgctcaaactcatgaccggacaaaagggccgtcaaccccgcattttggcgtaa

SEQ ID NO: 7355 - protein, 403 aa, Synechococcus sp. PCC 7002
MEKSHLGFDVIIVGGGIVGVTLAACLKRTNLRIAIVEAQPLDVVTQRQRAYAMSLLSQRLFQELGVWEVIAARSGKYRNIQLSDEDFSGVVRFSRQDLKTDFLGFSGQHQVVLETLQASLRGYGNIRWFCPAQVTAIHYESEQAIVELSSETQGQIKIQGALVVGADGPRSLVRQGASIKTRGWKYWQSCVTCVVEHDAPRNDVAFERFWGTGPMGVLPLTENRCQIVWTNPHAEAQRLKELPPEVFLEYLEQHTGPQLGRLKLLGDRQVFPVQLMQGDRYVDHRLALVGDAAHCCHPVGGQGLNLGIRDAAALAQTLIEAQQRGQDLGSLAVLKRYERWRKRENLVILGFTDFLNRLFSNRIWPVVWVRRLGLIVMAKFNPLRLFALKLMTGQKGRQPRILA

SEQ ID NO: 7356 - DNA, 1176 bp, Haemophilus somnus 2336
  CDS (1)..(1176): transl_table=11
atgaaaatatttgatattgcaattattggtggaggaatggtgggcttggctttagctgccagcttgcgaaatagccctgtgaaaattgctgtaattgaaggatttcctaataaagaaccgattgagcaacttagtaatcgtgtgagtgcaataaatttagccagcgaaaaaatgttgcaaaacttggaagtttggcaagctttattgaatttgagagcgacagcatacgacaaaatggatgtttgggagaaagatagttttgcacaaattcaatttgatacacaaagtttagggctggagcatttagggcatattattgaaaatcatctgattcaaaatcaactttggcaaaaggtaaaaatgcaaaaaaatgtggaaattattaccgcacttccgcatcatttaggactcaccgaaaacaatgcaattttaaccacaaatgatggacaaatgctatcggcaaaattaattgtaggggctgacggagcaaattcttgggtgcgtaaacaagcagatattccgctcatttttcgtgattatggacatcatgctttagtttgcaacgtaaaaacttctgaatcgcataagaattgtgctagacaaatttttaacaaagacagcatcttagctttcttgcctttacatcaacaaaatttatgctcaatagtttggtctttaccgccacagcaagccaatgaactcttaaacgcagaggaaaatgaatttaataaaaacttatctgtagcttttgacaatcgtttaggattatgcaaggtgcgtggagaacgcaaagttataccattaactgcacgttatgcacgtagttttgccaaacatcgcattgtgttagtaggagatgcggctcatactattcaccccttagccggacttggagtcaacttaggttttcaagatgctgttatacttgcacaagaaattaacaaaaatttagctttaagaatggatattggtgaataccgatatttgcgtcattatgaacgctgccagaaaacagcggcagtcaaaatgttagtgacaatgcagggactaaaagaactctttaacggcgataatccagtgaaaaagttagtacgtggtataggtttaaataccactaaccgatttggtttcgtcaaagaacaaataatgaaacaagcactaggaatatccttttaa

SEQ ID NO: 7357 - protein, 391 aa, Haemophilus somnus 2336
MKIFDIAIIGGGMVGLALAASLRNSPVKIAVIEGFPNKEPIEQLSNRVSAINLASEKMLQNLEVWQALLNLRATAYDKMDVWEKDSFAQIQFDTQSLGLEHLGHIIENHLIQNQLWQKVKMQKNVEIITALPHHLGLTENNAILTTNDGQMLSAKLIVGADGANSWVRKQADIPLIFRDYGHHALVCNVKTSESHKNCARQIFNKDSILAFLPLHQQNLCSIVWSLPPQQANELLNAEENEFNKNLSVAFDNRLGLCKVRGERKVIPLTARYARSFAKHRIVLVGDAAHTIHPLAGLGVNLGFQDAVILAQEINKNLALRMDIGEYRYLRHYERCQKTAAVKMLVTMQGLKELFNGDNPVKKLVRGIGLNTTNRFGFVKEQIMKQALGISF

SEQ ID NO: 7358 - DNA, 1167 bp, Haemophilus somnus 2336
  CDS (1)..(1167): transl_table=11
atgcaaaaagatattattgttgttggtggcggtatgattggtgcggcttgtgcgacaggattagctcaattgggattacaaattcacgtcattgaacatcattctctacctgaatttgattcgacatcggagtatgacattcgcatttctgcaattagtgctgcatcagttaatttattgaaaaccctaaaggcatggcagcatatcgaaaaaatgcgtattttcccttatcgaggactggaaacttgggaaattgaaggttttgcaacccaatttcactgccaagatttacagttagcggaacttggatttatggtagaaaataatcttattcaactaggattatggcagacattttcttcctaccataatattactaccaacgtggaaaatgcgattaaaaatgttgaaaagtgcggtaaaaattggcgtatttttttatccaatggagaaagttatcaagcacctctcatcattgcagctgacggtgccaattcacaattacgccaaattgcaggcataggtttgacaggctggcaatatcgacaagattgcatgctcattttagtgaatgtagaacaagatcaacaacatattacttggcaacaattttatccctccggacctagagccttgttaccattacaaaataagcaagcctgtttagtttggtatgacagcccacaaaaaatacgtgaattaaaacagctgtcaaatgaaaaacttgcagaagaaattcatcaagcatttccccctagactgggcaaaataaacgtacaaaaatttgcgacttttgcactaacacgtcgtcatgcacaagattatttcaaacaaggtattgttttagttggcgatgccgctcacacgattaatcctcttgccggacaaggtgtcaatttaggttttaaagacgtcaaagtcctgcttagtgtaattgaaagtgcggtaaaaaataatgaagatttttcaacggatcatgttttacaacgttatcaaaaccgacggaagcctgataatttactgatgcaatctagcatggatttgttttataaagcctttaaagaagatagcatgccattaaaaatagctcgtaacttggcattactgggtgcaaacaaaatcacgcctcttaaaaaacaagcgttgaaatacgcacttggtttgtaa

SEQ ID NO: 7359 - protein, 388 aa, Haemophilus somnus 2336
MQKDIIVVGGGMIGAACATGLAQLGLQIHVIEHHSLPEFDSTSEYDIRISAISAASVNLLKTLKAWQHIEKMRIFPYRGLETWEIEGFATQFHCQDLQLAELGFMVENNLIQLGLWQTFSSYHNITTNVENAIKNVEKCGKNWRIFLSNGESYQAPLIIAADGANSQLRQIAGIGLTGWQYRQDCMLILVNVEQDQQHITWQQFYPSGPRALLPLQNKQACLVWYDSPQKIRELKQLSNEKLAEEIHQAFPPRLGKINVQKFATFALTRRHAQDYFKQGIVLVGDAAHTINPLAGQGVNLGFKDVKVLLSVIESAVKNNEDFSTDHVLQRYQNRRKPDNLLMQSSMDLFYKAFKEDSMPLKIARNLALLGANKITPLKKQALKYALGL

SEQ ID NO: 7360 - DNA, 1260 bp, Nostoc punctiforme PCC 73102
  CDS (1)..(1260): transl_table=11
atggccctaacgcagcttgagcaacctctctcccctcaaccaacaccgccagacttgcggggatatgaatatgatttggtaattgtcggcggtgggattattgggttaactctagcctctgctttaaaagattctggcttgagtatcttgctgattgaggcgaaagtcgcatcagcggcggtagctaagggacaagcttatgcagttcatcagctttcggcgttaatttaccaaggaattggagtttgggacaaaatattgcctcaaatcgccaaatatcgccgagttcgtctttctgatgccgattatcccaacgtggtggaatttaccacagatgatatacatacagcagagttgggttatgtggcggaacaccaagcgctgttgcagcctttgcaggagtttgtccaagattgtccaaatgtgacatatctgtgtccggctgaagtggtaaatacacagtaccagaaagatatagtcgcagtagatattaaagtagccgatcagttatacacagttcgcagcaaattactgatagcagcagatggggcgcgatcgccaattcgtcaagctgctggtattaaaacctccggctggaaatattggcagtcttgcatcgtggcatttgtcaaaccagaaaaacctcacaataacaccgcttacgaaagattttggtctagcgggccctttgcgattttacctttaccagagaaccgttgccgcattgtgtggacagcccctcacgaagaagcaaaagctttgtgtgccttagatgatgagcaatttttagcagaactcacccgtcgttatggcgatcagatggggaaattggaattactaggcgatcgctttgtattccaggtacaactcatgcaaagcgatcgctatgttctcccccgactggcattaattggtgatgcggcgcacaattgccatcctgtgggtggacaaggtttaaatttgggaattcgggatgcagcagctttggcgcaagtaatccaaacagcgcaccaagcgggtaaagatattggcgacattcaaattcttaaaggttatgaacgctggcgcaagttggaaaacctgactattttaggtttcaccgatttgttagatcggatgttttctaataacttcttacctgtagtggtggttcgtcgcttgggtttatggtttttgcaacgagtaccccttttaaaggtgtttatgctgaagttgatgattggcttgaaagggcggactccagaattggcaaaacgataa

SEQ ID NO: 7361 - protein, 419 aa, Nostoc punctiforme PCC 73102
MALTQLEQPLSPQPTPPDLRGYEYDLVIVGGGIIGLTLASALKDSGLSILLIEAKVASAAVAKGQAYAVHQLSALIYQGIGVWDKILPQIAKYRRVRLSDADYPNVVEFTTDDIHTAELGYVAEHQALLQPLQEFVQDCPNVTYLCPAEVVNTQYQKDIVAVDIKVADQLYTVRSKLLIAADGARSPIRQAAGIKTSGWKYWQSCIVAFVKPEKPHNNTAYERFWSSGPFAILPLPENRCRIVWTAPHEEAKALCALDDEQFLAELTRRYGDQMGKLELLGDRFVFQVQLMQSDRYVLPRLALIGDAAHNCHPVGGQGLNLGIRDAAALAQVIQTAHQAGKDIGDIQILKGYERWRKLENLTILGFTDLLDRMFSNNFLPVVVVRRLGLWFLQRVPLLKVFMLKLMIGLKGRTPELAKR

SEQ ID NO: 7362 - DNA, 1281 bp, Bartonella quintana str. Toulouse
  CDS (1)..(1281): transl_table=11
gtgtattctgatctcaatgaaggtataaaacccaataaaaacacaagagccaataaaaaaaaagaacaatgtgatctcctcattgcaggtggcgcggctgtcggtttaacgctggcagtagcgctcaaacaagctgcccctgatttgaaaattaagatcgtcgatgctgttcctcaaggagatatccctgtttccaatatacgcgcacttgccctttctgctgcctctattcgtatgttgaaacaactgcaatgttgggaacatataaaatctcatgctcaacctattcattcaatgatcatcacagatgcatacacaaatgatcctgtcaaaccaactcttttaacctttgaaggaaatgttacccccaacgagccctttgctgctatggtggaacatagagagctcctcaatgctttaaaaaagcgtgcaaaagatctaggtattcctttcctcgcaaacatgcgtattattgattttcaccaaaaagatcaacacaccactgtcactttaagcaatgaagaaatctggcaaacgaaattgctaattgcagctgacggagcacattcggaattacgcgaaaaagcaggtcttaaaaatttttctcgtccctataaacaaacagcaatcatctgcacgattgaacatgaaaaaccccatcatggtcaagcaatccaacatttcttacctgctggccctttcgctcttctccctctcaaaggaaatcgatcagccgtggtatggaatgaacagaataaaactgcgcaatattatttcaaagctgatgctcttatttttgaaacagaaatcaaaaaacgtattggtcaccgatatggaaagctcacttggaatggggaacgccaagcctttcctttaaagctttctttagcacgccaatgtattaaaccgcgctttgttctcattggtgatgctgcgcatacaatccaccctcttgcaggacaaggcctcaatttaggattacgcgatagtgccgcactcgccgaagtgattattgaaacagcgcggttaggtcttgatattggatctttcattgctctcgaacgctatcaaagctggaggcgttttgaaactgtacgtatggctctgagcaatgactggcttaaccaactcttttctaatgataacctgctcttgcgaatgctccgcgatgttggtcttggaattgtcaatcaaacgccaaaaatgaaaaaatatttcattcaagaagcctccggtctcacccgtcatgccccacgtctgctgcacggattgccactctaa

SEQ ID NO: 7363 - protein, 426 aa, Bartonella quintana str. Toulouse
MYSDLNEGIKPNKNTRANKKKEQCDLLIAGGAAVGLTLAVALKQAAPDLKIKIVDAVPQGDIPVSNIRALALSAASIRMLKQLQCWEHIKSHAQPIHSMIITDAYTNDPVKPTLLTFEGNVTPNEPFAAMVEHRELLNALKKRAKDLGIPFLANMRIIDFHQKDQHTTVTLSNEEIWQTKLLIAADGAHSELREKAGLKNFSRPYKQTAIICTIEHEKPHHGQAIQHFLPAGPFALLPLKGNRSAVVWNEQNKTAQYYFKADALIFETEIKKRIGHRYGKLTWNGERQAFPLKLSLARQCIKPRFVLIGDAAHTIHPLAGQGLNLGLRDSAALAEVIIETARLGLDIGSFIALERYQSWRRFETVRMALSNDWLNQLFSNDNLLLRMLRDVGLGIVNQTPKMKKYFIQEASGLTRHAPRLLHGLPL

SEQ ID NO: 7364 - DNA, 1281 bp, Bartonella henselae str. Houston-1
  CDS (1)..(1281): transl_table=11
atgtactctgatctcaatgaaggtgtaaaaccctacagaatgacaaaatctcataaaaatataaaacaatgtgatctcctcattgcagggggtgcagctgttggtttaacattggcaatagcactcaaacaagctgcccctgaactgaaaattaacatcgttgacgctgcgcctcaagaagttatccccgtttccaatatacgcgcacttgcccttgctgcagcttctattcgtatgttaaaacaattacaatgttgggaacatatagccccccatgcccaacccattcattccatgatcataacagatgcatacacaaatgatcctgtcaaaccaactctcttaacctttgaaggagatattactcccaacgagccctttgctgctatggtggaacataaagagctcctcaatgctttaaaaaagcgtgcaaaagatctggatatccccttcatcactaacatgcgtattgttgatttccaccaagaagatcaacacaccactgtcactttaagcaataaagaaatttggcaaacgaagttgctaattgcggccgatggagcacattcgaaattacgcgaaaaagcaggtcttaaaaagttttctcattcttatacacaaacagcaatcatctgcacagtcgaacatgaaaaaccccatcatggtcaagcaatccaacattttttacctgctggacccttcgctcttctccctctcaaaggcaaccgatcagctattgtatggaatgaagaccataaaactgcgcaatattaccttaaagccgatgctcttatttttgaaacagaaatcgaaaaacgcattggtcaccgatatggaaaactctcttggaatggtgaacgccaaggctttcccttgaacctttctttaacacgccaatgtattaaaccgcgctttgctttgattggtgatgcagcgcacacaatccacccccttgccggacaaggtctcaatttaggcttacgcgatagtgctgcacttgccgaagttatcattgaaacagcacgattgggtcttgatattggctcccttactgctttagagcgctatcaaagctggagacgttttgaaattgtccgcatggccttgagcaatgactggcttaataaactcttttctaatgataatcttctcttacgaacgctccgggatgtcggccttggaattgtcaatcaaacaccaaaggtaaaaaaatattttattcaggaagctgccggcctcacccctcatgctccacgtctgctacacggtctccccctctaa

SEQ ID NO: 7365 - protein, 426 aa, Bartonella henselae str. Houston-1
MYSDLNEGVKPYRMTKSHKNIKQCDLLIAGGAAVGLTLAIALKQAAPELKINIVDAAPQEVIPVSNIRALALAAASIRMLKQLQCWEHIAPHAQPIHSMIITDAYTNDPVKPTLLTFEGDITPNEPFAAMVEHKELLNALKKRAKDLDIPFITNMRIVDFHQEDQHTTVTLSNKEIWQTKLLIAADGAHSKLREKAGLKKFSHSYTQTAIICTVEHEKPHHGQAIQHFLPAGPFALLPLKGNRSAIVWNEDHKTAQYYLKADALIFETEIEKRIGHRYGKLSWNGERQGFPLNLSLTRQCIKPRFALIGDAAHTIHPLAGQGLNLGLRDSAALAEVIIETARLGLDIGSLTALERYQSWRRFEIVRMALSNDWLNKLFSNDNLLLRTLRDVGLGIVNQTPKVKKYFIQEAAGLTPHAPRLLHGLPL

SEQ ID NO: 7366 - DNA, 1209 bp, Acinetobacter sp. ADP1
  CDS (1)..(1209): transl_table=11
gtgcaacagcaagtcattattgtgggtgggggaatggtcggactgagtctggctttaatgttggcgaagcaaaaaatcgcggtcaaacttttggaagcaatacgttatccagattacgacgatgcgaatctggcgccttatcactccagttttgatgcacgtaatactgcgctttcacgccgtagtgtacaaatttatcaaaaattagagttgtggaatgcacttcagcagcatgctaccccaattttgcaggttcatattacagagcagggaagttttggtaaggcacgcttgactgccgaacaagagaaagtcgaaagttttgggcaagtcattgaaaatgcctggcttggtcgggtgttgcttaccgaggttcgcgagcaaaccttgattgagctgattgatgggattgaagtgacggcattgcatcaagacgctgaaaaggtctttattgaggccaaacgtggtgatgaacagcttagtttaagcagtcagttagtaattgctgcagatggccgtgattccttttgtcgtcaagccttaggtattggtgccgatgtgcatgattatgatcaagttgcaattgtcaccgcagtacagacatctaaaccacatcaacatattggttttgaacgttttagcgagttggggcctttagcattactcccattgccaggagagtatcgtcgatctgtggtatggcctgtgaaaaaaggtacagaaagtgaatggctgggtgaagataacgatcagcattttttgaatgccttgcaacagacttatggcgatcgtgcagggaaatttgaaaaaacgggtaaacgttttagttatccattgtctcaggtactcgcgcacaaacaggcggtgggtcgggtggtattgatgggaaatgcagcacataccattcatcctgttgcagggcagggttttaatttatgtttgcgtgatgcagatgttctggttcgttatttattacaacagttagcgacttcgaatgatatcggtcaaccagaaaacctgttggcgtatgagcaggcgcgtttaaaagatcagcagcgtgtaattcggttttgtgattctgttgtccgtggttttagtcatcaaaatcctattcttaagttattgcgtaatactggtttgattgcttttgatgtgattcctggaatcaagccgttggttgccaattacgctatgggattaaaagcatga

SEQ ID NO: 7367 - protein, 402 aa, Acinetobacter sp. ADP1
MQQQVIIVGGGMVGLSLALMLAKQKIAVKLLEAIRYPDYDDANLAPYHSSFDARNTALSRRSVQIYQKLELWNALQQHATPILQVHITEQGSFGKARLTAEQEKVESFGQVIENAWLGRVLLTEVREQTLIELIDGIEVTALHQDAEKVFIEAKRGDEQLSLSSQLVIAADGRDSFCRQALGIGADVHDYDQVAIVTAVQTSKPHQHIGFERFSELGPLALLPLPGEYRRSVVWPVKKGTESEWLGEDNDQHFLNALQQTYGDRAGKFEKTGKRFSYPLSQVLAHKQAVGRVVLMGNAAHTIHPVAGQGFNLCLRDADVLVRYLLQQLATSNDIGQPENLLAYEQARLKDQQRVIRFCDSVVRGFSHQNPILKLLRNTGLIAFDVIPGIKPLVANYAMGLKA

SEQ ID NO: 7368 - DNA, 1233 bp, Acinetobacter sp. ADP1
  CDS (1)..(1233): transl_table=11
atgacacaaatcgcagatgtggtaattgtaggtggtggattggttggtggcctaacggcattgctgcttgcccaaggtggtgttcaagcgactgtactggatgctgcgcccatacttgatactgcaaaagttgaaagtgtgatgaacccgcgtgtgcttgcactgagtcaggcaacaattcatctgcttaaaaccgttgaggtatgggagcttatttcacggcaaatgccttatacagggatgcaggtgtggaataaaaatggctatggtgatattcaatttggacatcacagcgcctcaacgcctatgattgatcaggcactgggttctatggtcgaacctagtttattgaatcttgcgattcagcaaaaaatgagagccgttattcaggattatcgaaccgaggttcaggttgttcagattgaacaactgccaaatctttggcagatccatctggctgatggtcattgtatccagacacgattattaattggtgccgatggcgcaaattcgttcgtacgcgaaaaggccatgattgatctggatgtacttgactataaacaagcagcaataagctgtgcgataaaaacagcgctctcgcatgagcatgtcgctcgtcaaatttttctgccaacagggcctttggcctttttgcctatggcaagtctcgttccagccgagcagggtttgtggcaatcgattgtttggaccttaccagatgattatgcagatgagtattcagcgctgtcggatcatgaatttaaagcgttgctaactcgtgagagtcagcacatgctaggtgaggttgttgaagtccgatcaagagctcaatttccattaaaagctcgtgcagcaaaacaatatgtgaaagagggtctggcattgattggtgatgccgcgcatgtgatccatcctcttgctggacaaggcgtaaacattggctgtctggatgctgcggttttgtgtgatgcattactgcatgatcgtgcgcgtggtgtctgggctcatgagcaaactttgagacgctatgaacatgagcgtaaaggtcaaaatgatgccatgatgcatggcatgtcgatcattggctggctagaaagtcaggagtttttcccgctcattgcactacgcaacacagggttacgatgggtcgaaaacagtgaaattcttaaaaattcatttttgcaacaagcgacgggattaagcattttaaataagactcggtatgtgtcttga

SEQ ID NO: 7369 - protein, 410 aa, Acinetobacter sp. ADP1
MTQIADVVIVGGGLVGGLTALLLAQGGVQATVLDAAPILDTAKVESVMNPRVLALSQATIHLLKTVEVWELISRQMPYTGMQVWNKNGYGDIQFGHHSASTPMIDQALGSMVEPSLLNLAIQQKMRAVIQDYRTEVQVVQIEQLPNLWQIHLADGHCIQTRLLIGADGANSFVREKAMIDLDVLDYKQAAISCAIKTALSHEHVARQIFLPTGPLAFLPMASLVPAEQGLWQSIVWTLPDDYADEYSALSDHEFKALLTRESQHMLGEVVEVRSRAQFPLKARAAKQYVKEGLALIGDAAHVIHPLAGQGVNIGCLDAAVLCDALLHDRARGVWAHEQTLRRYEHERKGQNDAMMHGMSIIGWLESQEFFPLIALRNTGLRWVENSEILKNSFLQQATGLSILNKTRYVS

SEQ ID NO: 7370 - DNA, 1203 bp, Legionella pneumophila subsp. pneumophila str. Philadelphia 1
  CDS (1)..(1203): transl_table=11
gtggcgaataaagagactgatatactgattattggcggtggtttgactggtgcaagcttatccttggctctgcagggattaggtttctctgtcacgttagtagaatccaggccatacagcgataaggtaaatcctgattttgatgctcgctcattggcgttgtcgcctgcaagtcaacgtatattggcaatgctgggagtttgggaaattctcaaagaatatacaacaccaattcatatgattcatgtttctgatcagcatcgctttggggcttctcgtttacatggcgaaaaaaacagtcctttgggctatgtggtagaaatgcaatacatcaacagggctttgagtattctaatcaataaagaacacttgttaactccagcggctttaaaatccatcgattttaacaattctactgccactgtcgcccatggcgacgatatgatttctatccgagctcaattaattgtcgcagccgatgggacggagtcgatgacacgctacctttgtaatctgccagtcaaaataaaagattatgctcaagacgctattgtcgccaatgtaggtctgataaaaccgcatggcaatcgtgcttttgaacggtttacgcctaatggtcctcttgcattattgcctatgatgaatgacaaaatgtcattggtatgggcatcaaagcctgaagaagcaaaacgcttagtgatgttgaatgatgatgattttttgcgagaactgcaaactgcttttgggtataggttagggcgatttggtaaagtaggaaagcgatactcctatcccttgaaacaagttttaatgccccagcaaaccaaatggcctgttgtttttgttggtaatgccgctcacactttgcatccagttgcgggtcaggggtttaacttgggtttaagggatattgcggctttggcacaatgcatcagccaaaagggattaaatccacagatgttggagcattatttgcaattacgagcacatgatcagcaaatgattacctggctaacagacggtttaatacatctatttacgagtcgtttacccggtatgggagtagcgcgtaaccttggattgctggcacttgataatataccggcattaaaaaatttattagcgcgatatgcgcgggggtttggcggaattactcctgatttggtttgtgaaattgcattaagcgcaggagaatttcaatga

SEQ ID NO: 7371 - protein, 400 aa, Legionella pneumophila subsp. pneumophila str. Philadelphia 1
MANKETDILIIGGGLTGASLSLALQGLGFSVTLVESRPYSDKVNPDFDARSLALSPASQRILAMLGVWEILKEYTTPIHMIHVSDQHRFGASRLHGEKNSPLGYVVEMQYINRALSILINKEHLLTPAALKSIDFNNSTATVAHGDDMISIRAQLIVAADGTESMTRYLCNLPVKIKDYAQDAIVANVGLIKPHGNRAFERFTPNGPLALLPMMNDKMSLVWASKPEEAKRLVMLNDDDFLRELQTAFGYRLGRFGKVGKRYSYPLKQVLMPQQTKWPVVFVGNAAHTLHPVAGQGFNLGLRDIAALAQCISQKGLNPQMLEHYLQLRAHDQQMITWLTDGLIHLFTSRLPGMGVARNLGLLALDNIPALKNLLARYARGFGGITPDLVCEIALSAGEFQ

SEQ ID NO: 7372 - DNA, 1164 bp, Legionella pneumophila subsp. pneumophila str. Philadelphia 1
  CDS (1)..(1164): transl_table=11
atgagccaacattttgatgtacttgtcattgggggcgggattgttggcttgacagcagctttagctatggcccaacgccattatactgttgctgttatcgatgcagggacattgatggtcaatacagacaagagtgatttgcgtgtttatgccatcaataaggcatcaaaaatgttattaagtgaattagaagtgtggcagcacctcaatgatgcccgggtcgctccttataataaaatgcatgtatgggatggtgtgagtggcgcatatattgattttgattctcgcagtattgctgagccaaatttaggggcaattattgaagaatcaatcttaaagcaagctttgttgcgtcgaatctcatcagaatccaaaataagtttatttcctcaaagtgtaatagatgaggtgtgccatttagagcggagtatcaagatctccggccaaaatactgcctgggaagggcagttattgatgatcgctgacggagctaactcccctatgcgtcataagcttaaggtggatgtaaccagctggtcttatgagcagcaagcgttggtcgcaacggtaagtagtgagaaatcacatcagaatactgcttttcaagtgtttcatcctgatggccctttggcttttttgccattatctaatctcaatcaatgttctatcgtttggtcaactcatgccgataatgcgatgcgattgaaattacttgatgataatgaatttagccgggaattgactaaggcatttggaggtcagctagggcaaataaaggtagtaagcagtcgccatcaatttcctttacagatgagacatgtcaagcaatatgcagggcatcgctggttattgcttggtgatgcagcccacactattcatccattagccggtcttgggttaaatgttggcctggctgatgtgaaaagctggttaacctgtcttgaaatgggtaaagatgaattgatatccaaaaaagtattaggggcataccaaagggaacgcaagcattctgtttggcaaattattttgcttatggagggatttaaaagattatttggaacctccgcatctcctgttacctcattacgcagtctcggattgagggcatgcaatgaatttatcccgattaaacgattatttatgcgccaggctagcggtttataa

SEQ ID NO: 7373 - protein, 387 aa, Legionella pneumophila subsp. pneumophila str. Philadelphia 1
MSQHFDVLVIGGGIVGLTAALAMAQRHYTVAVIDAGTLMVNTDKSDLRVYAINKASKMLLSELEVWQHLNDARVAPYNKMHVWDGVSGAYIDFDSRSIAEPNLGAIIEESILKQALLRRISSESKISLFPQSVIDEVCHLERSIKISGQNTAWEGQLLMIADGANSPMRHKLKVDVTSWSYEQQALVATVSSEKSHQNTAFQVFHPDGPLAFLPLSNLNQCSIVWSTHADNAMRLKLLDDNEFSRELTKAFGGQLGQIKVVSSRHQFPLQMRHVKQYAGHRWLLLGDAAHTIHPLAGLGLNVGLADVKSWLTCLEMGKDELISKKVLGAYQRERKHSVWQIILLMEGFKRLFGTSASPVTSLRSLGLRACNEFIPIKRLFMRQASGL

SEQ ID NO: 7374 - DNA, 1218 bp, Pseudomonas fluorescens Pf-5
  CDS (1)..(1218): transl_table=11
atgcgcgcagatgtgctgattgtcggagccggaatggtcggcagtgccttggcgttggcgttgcagggcagcggcctggaagtgctgctgctcgatggcggttccctgagtgtcaaacccttcgatgaccaggcgccgttcgagcctcgggtcagtgccttgtcggcggccagccagcgcatcctggagcgcctgggcgcctgggacggcattgcccggcgccgtagcagcccctactgcgacatgcaggtctgggacggcagcggcaccgggctgatccacttctcggcgtccagcgtgcatgccgaggtgctgggtcatatcgtcgagaaccgggtggttcaggacgccttgctcgaacgcctgcatgaatgcgatatcggcctgctggccaatgcccgtctggagcagatgcgccgctccggcgacgactggctgctgaccctggcggatggccggcaattgcgtgcgccgctggtgatcgctgccgatggcgccaactcggccgtgcgccggcttaccggttgtaccactcgcgagtgggattacctgcatcacgccatcgtcaccagcgtgcgcagcagccagcctcaccaattgaccgcctggcagcgcttcaccgataccggcccgctggccttcctgcccctggtacgggacgggcagcatgattggtgttcgatcgtctggtcgaccaccccgagtgaggccgagcgcctgatggcgctggacgacgagagcttctgcgccgaactggagcgcgccttcgaaggccgcctgggttcggtgatcagcgccgacccgcggctctgcgtgccgttgcgccaacgccatgccaagcgctacgtggccgaaggcctggcgctgatcggcgacgccgcccacaccatccacccgttggcggggcagggggtcaacctgggcttcctcgatgccgccgtgctggccgaagtgctgctgcaagcggccagccgcggtgagcgcctggccgaggtcaaggtgctgagccgcttcgagcgccggcgcatgccccacaacctggcgctgatggcggccatggagggcttcgagcggctgttccaggccgacccgttgcccatgcgctggctgcgcaacaccggcctcaaggtgatcgaccagatgcccgaggccaaggccctgttcgtgcgccaggccctgggcctgagcggcgacttgccggaactggccagagcctag

SEQ ID NO: 7375 - protein, 405 aa, Pseudomonas fluorescens Pf-5
MRADVLIVGAGMVGSALALALQGSGLEVLLLDGGSLSVKPFDDQAPFEPRVSALSAASQRILERLGAWDGIARRRSSPYCDMQVWDGSGTGLIHFSASSVHAEVLGHIVENRVVQDALLERLHECDIGLLANARLEQMRRSGDDWLLTLADGRQLRAPLVIAADGANSAVRRLTGCTTREWDYLHHAIVTSVRSSQPHQLTAWQRFTDTGPLAFLPLVRDGQHDWCSIVWSTTPSEAERLMALDDESFCAELERAFEGRLGSVISADPRLCVPLRQRHAKRYVAEGLALIGDAAHTIHPLAGQGVNLGFLDAAVLAEVLLQAASRGERLAEVKVLSRFERRRMPHNLALMAAMEGFERLFQADPLPMRWLRNTGLKVIDQMPEAKALFVRQALGLSGDLPELARA

SEQ ID NO: 7376 - DNA, 1302 bp, Psychrobacter arcticus 273-4
  CDS (1)..(1302): transl_table=11
atgaaaaataaccatacgctgattattggtggcggtatcgttggcgcgacgcttgcgcttaaactggcacaagacaataagcccgtgacacttattgatgcacgcccaaaacgtagcgaggcagattggcagcaagtgcttggtcaacgtgatgcgcgtgtttatgcgcttagccttgccagtattcatttgctaaaagaggttggcgcttggcaaaagatagcagcgtcagagcgtaaagctgattactcacaaatgcaggtttggcaattgaatggtatgggcgagttactgtttggcgatagtggtgactctaatagcagtactggtaatagcaatgttgctaataataatgataacactgagccaaaaatgctcggtagtatggttgagcctgcagtcattgagcacgcactatggcagcgtttatcagcgcctgatgtcagtcaatatctaaccgttatcgctgggcacaaagttgtcgatatggactggctcggtgcgacacaaggctaccgtgtgacattagataatggcgatgtgattgatgcacgcctcttggttggtgctgacggtcgcggctcgtttgttcgtaagcaagcaggcattgagctggatgttcttgattataatcaaaccgcgatttgctgcgcgattcaaaccgaaaagccgcatctagcaactgctcgtcaagccatgctacctactgggacgttggcactgttgccgctcgctgatatcaccgatgaagacaaggccaatccacagcattggcagtctatcgtatggacactaccacgtaatcaggcattggcattggtagcggaacacccgtgctacatcgctgataaattggccgctgccagtcattatgagcttggtgctatccataaaatagaatcaatcgccagttttccgctagcagcacagcaggcaaaaagctatgtcgcggataatttggtattgattggtgatgcggcgcatggcgtgcatccgctggcgggacaaggactaaatctgggtatgcttgatgtgagagcattaagcaaacaattggctcatgattataaccgtagtggcggtacgctttggggtgccaatcaaactttgcgtagctatgagcgtttgcgtcgtccgcataatagtctgatgatgcacagcttctcggcgcttaactggctgtttgctggctcgctggctcagatacgtcctgttcagcaattacgtaatgaaggtatgtatcgggtcagtaaaattaaacctttaatgcgcctgtttgctaagcaggcgagtggggtttag

SEQ ID NO: 7377 - protein, 433 aa, Psychrobacter arcticus 273-4
MKNNHTLIIGGGIVGATLALKLAQDNKPVTLIDARPKRSEADWQQVLGQRDARVYALSLASIHLLKEVGAWQKIAASERKADYSQMQVWQLNGMGELLFGDSGDSNSSTGNSNVANNNDNTEPKMLGSMVEPAVIEHALWQRLSAPDVSQYLTVIAGHKVVDMDWLGATQGYRVTLDNGDVIDARLLVGADGRGSFVRKQAGIELDVLDYNQTAICCAIQTEKPHLATARQAMLPTGTLALLPLADITDEDKANPQHWQSIVWTLPRNQALALVAEHPCYIADKLAAASHYELGAIHKIESIASFPLAAQQAKSYVADNLVLIGDAAHGVHPLAGQGLNLGMLDVRALSKQLAHDYNRSGGTLWGANQTLRSYERLRRPHNSLMMHSFSALNWLFAGSLAQIRPVQQLRNEGMYRVSKIKPLMRLFAKQASGV

SEQ ID NO: 7378 - DNA, 1239 bp, Pseudomonas syringae pv. phaseolicola 1448A
  CDS (1)..(1239): transl_table=11
atggaaacgcgcgcagatgtgctgattgtcggagccggaatggtcggcagcgcccttgctctggcgttgcagggcagcggtcttgatgtgctggtggtcgacggtgggccgctgagcgtcaaaccctttgaccaacactcggctttcgagccacgggtcagtgccttgtcgacagccagtcagcgaattcttcagcggctgggcgtatgggaaggcatcgcggcccgtcgcatcagcccgtacgcgcacatgcaggtctgggatggcagcggcaccgggcagattcacttctctgcctccagcgtgcacgctgatgtgctgggccatatcgtcgagaaccgcgtggtgcaggatgcgttgctcgatcgcctgcatgaaagcgacatcagcttgctggccaatgcgcggctggagcagatgcgccactccggagatgactggctgctgaccctggccgacggtcgccagttacgcgcaccgctggtggttgcagccgatggtgcgaattcggcggtgcgccgcctgaccgaaacgccgacccgtgagtgggattacctgcatcacgctatcgtcaccagtgtgcgcaccgctgattcccacaggaaaactgcctggcagcgttttaccgacgacggtcccttggcttttctgccactggagcgcgagggcgagcactggtgctctattgtctggtcagtcacaccggctgaagccgagcgcctgatggtgctggaagatgacctgttctgtcgtgaactggagcaggcattcgaggggcgtctgggtcaggtagtgtctgccgatgagcgcgtttgtgtgccactgcgtcagcgtcacgccaagcgttacgttgccagggggttggcgctgattggcgatgcggcacataccattcacccgctggccgggcagggcgtgaacctgggctttctcgacgccgccgtgctggcgcaagtcctgacccacgctgccgggcgtggcgaacgttggtctgacctgcgcgtgctgggccgctacgagcgtcgtcgcatgccgcacaacctggcattgatggccgcaatggaaggcttcgaacggctgtttcaggccaaccaattgccactgcgctggttgcgtaataccggtttgaaaatggtcaaccggatgcccgaagccaaggctctgttcgtgcgcgaagcgttagggttgtcgggagatttgcctgagctggcgcggattgagcccgccactactctatag

SEQ ID NO: 7379 - protein, 412 aa, Pseudomonas syringae pv. phaseolicola 1448A
METRADVLIVGAGMVGSALALALQGSGLDVLVVDGGPLSVKPFDQHSAFEPRVSALSTASQRILQRLGVWEGIAARRISPYAHMQVWDGSGTGQIHFSASSVHADVLGHIVENRVVQDALLDRLHESDISLLANARLEQMRHSGDDWLLTLADGRQLRAPLVVAADGANSAVRRLTETPTREWDYLHHAIVTSVRTADSHRKTAWQRFTDDGPLAFLPLEREGEHWCSIVWSVTPAEAERLMVLEDDLFCRELEQAFEGRLGQVVSADERVCVPLRQRHAKRYVARGLALIGDAAHTIHPLAGQGVNLGFLDAAVLAQVLTHAAGRGERWSDLRVLGRYERRRMPHNLALMAAMEGFERLFQANQLPLRWLRNTGLKMVNRMPEAKALFVREALGLSGDLPELARIEPATTL

SEQ ID NO: 7380 - DNA, 1146 bp, Dechloromonas aromatica RCB
  CDS (1)..(1146): transl_table=11
atgactgaagcaaggcttgaacacgtcgacatcctgatcgtcggcgccggcccggtcggcatgacgctgcatctggcgctcgcggccggcggtcagaaatcattgcttttggaccgtcgaccgcaagaggcgcaacaaggtgacccccgcgccctagccctgtcgcatggcgcccgccagttgcttgaacagatcaatagctggccgacccgcaacgcgacgccgatcgaaaccatccacatctcgcagaaggatggtttcggccgaaccctgatcgaccgcaccgactacgacctccccgccttgggctacgtcgtccgctaccgcgacctggcgagcgcactgtccgccaacctggccgccgacgccgtgctgtcggaggcagaaatcctcgacatcgtccccggcgatgaacacgtcaccgtcgcactacgccacgccggccagttgcgtaccatccagacccgattgctgatacacgccgaaggcacgccgggcgacgacccggctgtcaaggtcagcaattacgagcagcatgcggtcatctgcgaagtcacgccaatgcctggccacaacaagcgcgcctgggaacgcttcacgcccgacggcccgctcgccctgttgccgctcggcgacgaatactccatcgtcttcacgctaccgcccgccaaggccgacgccgtaatggccatggacgacgaagcctttaccgccgccctgcaaacccagttcggccagcgcatgagcttcgccaagcccggcaagcgcagccgtttcccgctcgccttgcgcctgcgcgacacgctggtcaaggacaacgaagtgtggatcggcaacacggcgcaaaccctgcacccggtctccggccagggcttcaacctcggcatccgcgatgcctggcaactggcagaaattttgctcaaaaacggcattgaccgtgaaggcctcgaccactacgcaaaaatccgccgcctcgaccgccaaggcagcgcttttttcaccgaccagatcgttcgcgccttctccaacgatttcgccccactcaaactggcccgcggccttggcctgctcgccctcgatctctgcccggcggcccgccatttcgtcgccaagcgcatgatctggggcgcccgggcctggccttga

SEQ ID NO: 7381 - protein, 381 aa, Dechloromonas aromatica RCB
MTEARLEHVDILIVGAGPVGMTLHLALAAGGQKSLLLDRRPQEAQQGDPRALALSHGARQLLEQINSWPTRNATPIETIHISQKDGFGRTLIDRTDYDLPALGYVVRYRDLASALSANLAADAVLSEAEILDIVPGDEHVTVALRHAGQLRTIQTRLLIHAEGTPGDDPAVKVSNYEQHAVICEVTPMPGHNKRAWERFTPDGPLALLPLGDEYSIVFTLPPAKADAVMAMDDEAFTAALQTQFGQRMSFAKPGKRSRFPLALRLRDTLVKDNEVWIGNTAQTLHPVSGQGFNLGIRDAWQLAEILLKNGIDREGLDHYAKIRRLDRQGSAFFTDQIVRAFSNDFAPLKLARGLGLLALDLCPAARHFVAKRMIWGARAWP

SEQ ID NO: 7382 - DNA, 1158 bp, Thiobacillus denitrificans ATCC 25259
  CDS (1)..(1158): transl_table=11
gtgagccgcgcccgccatcaggtagtggtcgtcggcgctggcctcgtcggcgccgcaacggcactcgcgctcgcgcgacaaggcctgcgcgtggccttgatcgagcggcgtccgcccgacgttcccgatgcgacctgggacacccggatctacgccatcagcccggcgagccagcgctttctcgaacggctcggcgcctggcagaaaatggacgcggcgcgcattcagccgatttaccgcatggaggtggcgggcgacggccacggcgcggtgcggctcgacgcttacgaagccggcgtctcgcatctcgcctcgatcgtcgagagcggccgcctgcaggacgcgctgtggcgcacgatcgaggccgacggtagcgtcgccgtgcactgcccggctgcgatcgacgcgctcgaccgcggcgaagattcgacccgcgtgacgctcgccgacggcaccgttctcgaagccgatctcgtcgtcggcgccgacggcgcggcgtcccgcatccgtgactgggcgggccttgccgcggaggtcacgccctatgagcgaagcggggtcgttgccaatttcgattgcgaacgaccccatcacggcacggccttccagtggttttcgggcagcgacgtccttgcctggctaccgctgcccgggaaccgcgtgtcgatcgtctggtcaacggagatggcctccgccgcggcgctgctggcgctgcctgcgtccgaactggcggaaaaggtccgcgcggcgggcggtgaccggctcggcgccctgcgtctgctgacgccgcccgcggcttttcccttgcgacttatccgcgtcgaatccccgatcgcacccggcgtcgcgctggtcggcgatgccgcccacggcgtacacccgcttgccggacaaggtgtgaacctcggcttcggtgacgccgaggcgctcgtcgccgtgctcgcgcagcatcgccgtgccagccccggtgatcccgcgctgctgcgccgctacgcgcgcgcgcgggccgaaccggtcgcgcgcatacagggcgtcacgcacgggctgcaccatctcttcgcggcaccgcgcgcccagtggctgcgcaacgccgggatggacctcgtcgaccacctgccgccactcaaggcggcgctgatacgtgaagcaatgtcctga

SEQ ID NO: 7383 - protein, 385 aa, Thiobacillus denitrificans ATCC 25259
MSRARHQVVVVGAGLVGAATALALARQGLRVALIERRPPDVPDATWDTRIYAISPASQRFLERLGAWQKMDAARIQPIYRMEVAGDGHGAVRLDAYEAGVSHLASIVESGRLQDALWRTIEADGSVAVHCPAAIDALDRGEDSTRVTLADGTVLEADLVVGADGAASRIRDWAGLAAEVTPYERSGVVANFDCERPHHGTAFQWFSGSDVLAWLPLPGNRVSIVWSTEMASAAALLALPASELAEKVRAAGGDRLGALRLLTPPAAFPLRLIRVESPIAPGVALVGDAAHGVHPLAGQGVNLGFGDAEALVAVLAQHRRASPGDPALLRRYARARAEPVARIQGVTHGLHHLFAAPRAQWLRNAGMDLVDHLPPLKAALIREAMS

SEQ ID NO: 7384 - DNA, 1260 bp, Anabaena variabilis ATCC 29413
  CDS (1)..(1260): transl_table=11
atggcgctaacgcagattactcaaactgtttctcctcaaccgacaccgccagaactgcgaaaatacgactatgatttggtcatcgtcggcggcggaattgttgggttaaccctagcttcggcattaaaagattctggcttgaatatactgttgatcgaggctaaagtctcatccgcagcagtagccaaaggtcaagcctatgcagttcatctgctatcagcgctaatttaccaaggaattggtatttgggataaaattctgcctcagattgccaagtaccgccaagtccgcctttctgatgctgattatcctggtgtggtggagtttgaaaccacagatttagggacaccagaattaggttatgtagcggaacatcaagcgttactggaacctctacaggagtttgtgcagaattgcccaaatgtgacatatctttgtccggctgaggtggtgagtaccaattaccagcaaaatgaagtagtcatcgctgttaaaattgccgatcaattaaacacaatccgtagcaaattactggtagccgcagatggatcgcgatcgcctattcgtcaagcggcggggattaaaactcacggctggaagtactggcaatcctgcattgtcgcctttgtcaagccagaaaaaccccacaacgatacagcttacgaaagattttggcctagtggcccctttgcgattttacctctaccagggaaccgttgccgcatcgtttggacagctccccacgatgaagcaaaagccctgtgtgccttaaatgatgaagaatttttacaagaacttagccaacgctttggcaagcagatgggtaagttggaattgttaggcgatcgcttcgtttttcaagtacaactcatgcaaagcgatcgttatgttcttccccgtttagctttagttggcgatgcagcgcataattgtcatcctgtgggtggacaaggattaaacttgggtatccgagatgtcgccgctttagcccaagttatccaaaaagcacatcaagctggtgaagatattggcaacattcgggtattgaaacgttacgaaagctggcgacaaaaagagaacctagccattttagggttcaccgatatgttagaccggatgttttctaaccaattccctcccttggtgtttgttcgtcgtttgggtttatggtttttgcaaagtgtacccgcgctaaaaacatttatgctcaagttaatgattggattgaaggggaaaactccagaattagccaaacgttga

SEQ ID NO: 7385 - protein, 419 aa, Anabaena variabilis ATCC 29413
MALTQITQTVSPQPTPPELRKYDYDLVIVGGGIVGLTLASALKDSGLNILLIEAKVSSAAVAKGQAYAVHLLSALIYQGIGIWDKILPQIAKYRQVRLSDADYPGVVEFETTDLGTPELGYVAEHQALLEPLQEFVQNCPNVTYLCPAEVVSTNYQQNEVVIAVKIADQLNTIRSKLLVAADGSRSPIRQAAGIKTHGWKYWQSCIVAFVKPEKPHNDTAYERFWPSGPFAILPLPGNRCRIVWTAPHDEAKALCALNDEEFLQELSQRFGKQMGKLELLGDRFVFQVQLMQSDRYVLPRLALVGDAAHNCHPVGGQGLNLGIRDVAALAQVIQKAHQAGEDIGNIRVLKRYESWRQKENLAILGFTDMLDRMFSNQFPPLVFVRRLGLWFLQSVPALKTFMLKLMIGLKGKTPELAKR

SEQ ID NO: 7386 - DNA, 1224 bp, Pseudomonas fluorescens PfO-1
  CDS (1)..(1224): transl_table=11
atggaaatgcgcgcggatgtgctgattgtcggagccggaatggtcggcagtgccctggcgctggcgttgcagggcagcgggctggaagtcctgctgctcgacggcagcccgttgagcgtcaaacccttcaagggcgacgcaccgttcgagccacgggtgagcgcactgtcggcggccagccagcgaatcctcgatcgcctcggcgtgtgggacggcatcgtcaatcgacgcaccagcccttacaccgacatgcacgtctgggacggcagcggcaccgggcagatccacttctcggccagcagtgtgcacgccgatgtgcttgggcatattgttgaaaaccgcgtggtccaggatgccttgctcgagcgtctgcacgattgcgacctgggcctgctggccaacgcgcggctggagcagatgcgccgttccggtgacgactggctgctgaccctggccgatggccgcaccttgcgcgcgccgctggtgatcgcggcggacggcgccaactctgccgtgcgccgtctgaccggtgtcgccactcgcgagtgggattacctgcatcacgccatcgtcaccagcgtgtgcagcagcaaaccgcaccgcatgaccgcgtggcagcgtttcaccgatcacgggcctctggcctttttgccgctggagcgtgacggtcagcaggactggtgctcgatcgtctggtctaccacgccgagcgaagccgaacggctgatggcgctggaggaagcggacttctgccgtgagctggagcgcgcgttcgaaggtagcctcggcgaggtcatcagcgccgacccgcgcctgtgtgtgccgctgcgtcagcgtcacgccaagcgctacgtggccgaaggcctggcgctgatcggtgatgccgcacacaccattcacccattggcggggcagggtgtgaacctgggtttcctcgacgccgcggtgctggccgaagtgttgttgcaggccaacgaacgcggcgaacgcctagctgacgtgaaagtcctgagccgctacgagcgtcggcgtatgccgcacaacctggcactgatggcggcgatggaaggcttcgagcggttgttccaggctgacccgctgccgctgcgctggctgcgcaacaccgggctgaaaatcgtcgagcagatgcccgaggccaaggcgctgttcgtgcgtgaagcattggggctgaccggggacttgccggccctggccaaggcctga

SEQ ID NO: 7387 - protein, 407 aa, Pseudomonas fluorescens PfO-1
MEMRADVLIVGAGMVGSALALALQGSGLEVLLLDGSPLSVKPFKGDAPFEPRVSALSAASQRILDRLGVWDGIVNRRTSPYTDMHVWDGSGTGQIHFSASSVHADVLGHIVENRVVQDALLERLHDCDLGLLANARLEQMRRSGDDWLLTLADGRTLRAPLVIAADGANSAVRRLTGVATREWDYLHHAIVTSVCSSKPHRMTAWQRFTDHGPLAFLPLERDGQQDWCSIVWSTTPSEAERLMALEEADFCRELERAFEGSLGEVISADPRLCVPLRQRHAKRYVAEGLALIGDAAHTIHPLAGQGVNLGFLDAAVLAEVLLQANERGERLADVKVLSRYERRRMPHNLALMAAMEGFERLFQADPLPLRWLRNTGLKIVEQMPEAKALFVREALGLTGDLPALAKA

SEQ ID NO: 7388 - DNA, 1290 bp, Rhodospirillum rubrum ATCC 11170
  CDS (1)..(1290): transl_table=11
gtgagcgaacccctgttgcgcggccttgccgccggcgatcccccttcggccactgggccggtcactgggtccgccgataaggtcgccgatgttttgatcgtcggcggtggactggtcggcggaaccctggcctgcgccctcgccgaaaaaggcgtctcggtggtggtgatcgatggcgaggatcccgaggccctgctcgccgccggctatgacggccgctgctcggccatcgccctggcctgccagcggttgcttgacaccatcggcctgtgggatctgctgggcggtgaaagccaaccgatcctcgacatccgcgtcgtcgatggcggctcgccgctgtttctccattacgcccaggccgaggcccagggcccgatgggctatatggtcgagaaccggttgctgcgccaagccatcctgacccggcttggccggctgcccgccgccaccttgctcgctccggcgcgcatgaccgccctgcgccgcgacctcgacggcgtcagcgccaccttgtcggatggccaaacggtgcgcgcccggctggtggtcggcgccgatggccggcggtcccaggtgcgcgagagcgccgggatcggcatccgcaccctgggctatggccaaaccgccatcgtgctgacggtcgagcacgagcgttcccatcgcggctgcgcggtggagcatttcctgcccgccggtcccttcgccatcctgccgatgcccggcaaccgctcctcgctggtctggaccgagcggagcgatctggtgcccggcctgctcgccctgccggctgaacacttccaggccgaattagagcggcgctttggcgatcatctgggctgggtgcgtccggtcgggccgcgcttttcctatcggctgaccctgcaggcggccaaccgctatgtcgaccaccggctggccctggttggcgatgctgcccacggcatgcatccggtggccggtcagggcatgaactatggcctgcgcgacgtggcggtgctggccgaacggctggtcgccgcccagcgccttggccttgaccccggcgcccccgctctgctggccgagtacgaggcgctgcgccgccccgataatttgctgatgctggcgatcaccgacgccctggttcggctgttttccaatgatatcgcccccgtcgccctcgcccgccgcctgggcatcggcgccgtcgagcgcatggggccgctcaagcggttgttcatgcgccacgccatgggcaccttgaagctggggcccgagccgccgcgcctgatgcgtggggttcccttgtaa

SEQ ID NO: 7389 - protein, 429 aa, Rhodospirillum rubrum ATCC 11170
MSEPLLRGLAAGDPPSATGPVTGSADKVADVLIVGGGLVGGTLACALAEKGVSVVVIDGEDPEALLAAGYDGRCSAIALACQRLLDTIGLWDLLGGESQPILDIRVVDGGSPLFLHYAQAEAQGPMGYMVENRLLRQAILTRLGRLPAATLLAPARMTALRRDLDGVSATLSDGQTVRARLVVGADGRRSQVRESAGIGIRTLGYGQTAIVLTVEHERSHRGCAVEHFLPAGPFAILPMPGNRSSLVWTERSDLVPGLLALPAEHFQAELERRFGDHLGWVRPVGPRFSYRLTLQAANRYVDHRLALVGDAAHGMHPVAGQGMNYGLRDVAVLAERLVAAQRLGLDPGAPALLAEYEALRRPDNLLMLAITDALVRLFSNDIAPVALARRLGIGAVERMGPLKRLFMRHAMGTLKLGPEPPRLMRGVPL

SEQ ID NO: 7390 - DNA, 1221 bp, Novosphingobium aromaticivorans DSM 12444
  CDS (1)..(1221): transl_table=11
gtgaatgaattgagcgcagacgtcgtcatcctgggcggcggacttgtcgggatgacgctggcgatcggcctcgccaaggcggggatcagcagccatgtcgtcgacaattccgaccctgcggcgcagactgccgagggattcgatggccgcgcgtcggccatttccacggctagctggaacctctacgccaatcttggcatggccgacgaactcgcgccaaagggatgcccgatcgaggcgatcgcggtgacagacgcgatgaagcccggacggatcgacttcaagccgggcgagggcgatggctcgctgggccggatgtacgccaaccgtgacctgcgcatcgccatgtatgccgctgcggcgcgggaagaggcgatcaccttccacaccaatgccaacgtgatccaccgcgagcgcggcgagcatggcgtgtcggtcacgcttgccgacgggcgcatcctcaagggcaggttgcttgtcggtgcggaagggcgcaggtctcctacgcgcgacgaggcgggctttaccccggcgcgctgggactatggtcatcgtgcgatcattgccggcctgacccacgagaagccgcacggcaacgtcgcgtgggaagtgttctatccggccggaccgtttgcgctgctgccgttgctcgacgacgaggacggttcgcatcgctcggcgctggtctggacagtggcagagaaggacgcatcggcggtgctggcgatgcccgagccgatgttcctcgacgaagtttcgaagcggatgcacgagattttcggcgagatcaggctggcaagcccgcgttcgtcctatccgctgaacttccatcacaccgcgcggatcgtcgagcagcgcctggcgctggtgggcgatgcggcgcacgggatgcacccgattgcggggcagggcctgaatgtcggcctgcgcgatgtggcggcgctggtcgaggtgcttgcggatggcgttcggcttggtcttgacgtgggcgatgcgcaactgctggcgcgctacgagcgttggcgcgcggctgacacgttcatggtggcgaccgccaccgacgtcctgacgcggctgttcggcctgcccggacgagtgccttcggcgatacggcggctcggcatggcgggcgtgcagcgcatgggaccgctcaagcgctggttcatggacgaggcacgcgggatgagcggcgacttgcccaagctgcttcgcgcggcctga

SEQ ID NO: 7391 - protein, 406 aa, Novosphingobium aromaticivorans DSM 12444
MNELSADVVILGGGLVGMTLAIGLAKAGISSHVVDNSDPAAQTAEGFDGRASAISTASWNLYANLGMADELAPKGCPIEAIAVTDAMKPGRIDFKPGEGDGSLGRMYANRDLRIAMYAAAAREEAITFHTNANVIHRERGEHGVSVTLADGRILKGRLLVGAEGRRSPTRDEAGFTPARWDYGHRAIIAGLTHEKPHGNVAWEVFYPAGPFALLPLLDDEDGSHRSALVWTVAEKDASAVLAMPEPMFLDEVSKRMHEIFGEIRLASPRSSYPLNFHHTARIVEQRLALVGDAAHGMHPIAGQGLNVGLRDVAALVEVLADGVRLGLDVGDAQLLARYERWRAADTFMVATATDVLTRLFGLPGRVPSAIRRLGMAGVQRMGPLKRWFMDEARGMSGDLPKLLRAA

SEQ ID NO: 7392 - DNA, 1284 bp, Saccharophagus degradans 2-40
  CDS (1)..(1284): transl_table=11
atggctatgaaacaagaatacgacatagccatagtgggcggcggcattatcggcagtgcactggcggcagcgttaatggcaaacacccgctgtgccggtttgcgcgttgcgcttatcgatgccgcgccagaactaccggcggcaagcgttgtttgcggccagttcgacccgcgtgtagtggcgctatctaacgcgtcgcgcagcctattgcagcaggcgggcgtgtgggccgatatcgtcgccgagcgcgcctgcccctatttacatatgcatgtgtgggatgccgaaggcacgggcaatattcaatttaatagcaatgaattacagcgcgatagcttggggcacattgttgaaaacagcgtattgcaacgggcattgcgcgcgcgcttggcgcggggggatggctacgctcaagttgatgtgtgcgcagcaaagcttgtagagagtataacggcaccggtaaccgatccgtttggcaacgcatcaggcccaacccagctacactttgtaagtggcgaaacagttcgcgcacaattggtgttggcggttgatggcgccaattctagcctgcgtgaaatggcgggtttaactacacgcgaatgggaatatggccatacggctattgttaccactgtgcgcaccgagcagccccataactttaccgcttggcaacgctttacccagcaggggccaatcgcctttttacccctgtgcgataacccagaaggcgagcatgtaagcgccgatgatttggccaacaaagttgccaacttctgctcgctcgtgtggtctgtagaaagtaacaaggccgaagccttaatggcgttaaccgagcaggaattttgcgcgcagctaagccgcgaatttgaatacaaattaggcgcggtagagtgggccgacaagcgtgtggctattgcgcttaagcagcgccacgccaaaacttattttgtacccagcttggcattggttggcgacgctgcccacactattcaccccttggcggggttaggggctaacctaggtttggcggatgcttctattttagtgaatgaaattgcccgcgcctgcgagcgcaaactgccactcaccgataccagtattttgcgcaggtatcagcgccaacgccaaggcgaaaacttgggggtgatggtaaccatggaaggctttaagcgtctttttgctgccgacgacccagctattcgctgggcgcgcaacagcggtatgcgctggttaaataatgccggctggttaaaaaacaaaatggtttcgattgttgcaggctag

SEQ ID NO: 7393 - protein, 427 aa, Saccharophagus degradans 2-40
MAMKQEYDIAIVGGGIIGSALAAALMANTRCAGLRVALIDAAPELPAASVVCGQFDPRVVALSNASRSLLQQAGVWADIVAERACPYLHMHVWDAEGTGNIQFNSNELQRDSLGHIVENSVLQRALRARLARGDGYAQVDVCAAKLVESITAPVTDPFGNASGPTQLHFVSGETVRAQLVLAVDGANSSLREMAGLTTREWEYGHTAIVTTVRTEQPHNFTAWQRFTQQGPIAFLPLCDNPEGEHVSADDLANKVANFCSLVWSVESNKAEALMALTEQEFCAQLSREFEYKLGAVEWADKRVAIALKQRHAKTYFVPSLALVGDAAHTIHPLAGLGANLGLADASILVNEIARACERKLPLTDTSILRRYQRQRQGENLGVMVTMEGFKRLFAADDPAIRWARNSGMRWLNNAGWLKNKMVSIVAG

SEQ ID NO: 7394 - DNA, 1185 bp, Methylobacillus flagellatus KT
  CDS (1)..(1185): transl_table=11
atggcagatttgaaacatgagtttgacatcatggtgctgggtgctggcctggtcggtgtcgcgacggcgatagcactcaagctgaaaggccatcgcgtgatgctgctggagcagggcaaggttggaggcgagcgggctgggcttggattggccgcatgggacagccggatttacgccctgagcccgggcaatgttgcctggctggagcaattgggcgtctggccattgttggacgctgagcgggtttgtgcggtagatagcatgcggatatggggtgacgatggtgcggccctggagctggatgcgtatgctgccaacctggccagcttgagtgtcatcgtcgagggaagccgcctgcagcaggccttgcttgccagactgatgagcttggatgtacctgtgaatgatgaaatcagcattgatggagttgactggaatccagaaaatgtggtgttgcatgcagctaacggcggcacctatgctgccccattgctggtcggggccgacggggcttactcctggctgcgcgcccaagcggatatcacgctgagacggcatgattatgcacagatgggcgtagtggccaattttgcatgtgagcatccgcaccagtcgcaagcatgtcaatggtttcgcggcaacgatgtgcttgcctggctgccgttgccgcagcagcatatttccattgtctggtcagtggataatgccagggcgcaggccttgatggcattggatgctgatacactggcgcaagaggtggctgctgccgggcagcatcgcctgggccggttgatgctggttaccccggcgcaggcctttccgctggcgatgcaggaaacaagcagcctggtcaagcctggcctggccctggtgggggatgcagcgcacttggtccatcccctggctgggcagggagtcaacctgggtttccgcgatgtgcaggcattggccgaagcggtttcagggaagcaggccaggcgtctgccaggcgacatattcgtgttgcgccgttatgagcgggcacgtaaagccgatatgatgtccatgcgattgctgacacatgggttaagtatgttgtatgcacgtccaataccctgggtcaggatgttgcgcaatgagggtatgaaatgcttgaaccgtatgccggccttgaaaaaacagctggtacattatgcggtcatttga

SEQ ID NO: 7395 - protein, 394 aa, Methylobacillus flagellatus KT
MADLKHEFDIMVLGAGLVGVATAIALKLKGHRVMLLEQGKVGGERAGLGLAAWDSRIYALSPGNVAWLEQLGVWPLLDAERVCAVDSMRIWGDDGAALELDAYAANLASLSVIVEGSRLQQALLARLMSLDVPVNDEISIDGVDWNPENVVLHAANGGTYAAPLLVGADGAYSWLRAQADITLRRHDYAQMGVVANFACEHPHQSQACQWFRGNDVLAWLPLPQQHISIVWSVDNARAQALMALDADTLAQEVAAAGQHRLGRLMLVTPAQAFPLAMQETSSLVKPGLALVGDAAHLVHPLAGQGVNLGFRDVQALAEAVSGKQARRLPGDIFVLRRYERARKADMMSMRLLTHGLSMLYARPIPWVRMLRNEGMKCLNRMPALKKQLVHYAVI

SEQ ID NO: 7396 - DNA, 1260 bp, Methylobacillus flagellatus KT
  CDS (1)..(1260): transl_table=11
atgatgagtaatacagcggccacagtaaaccactctcaaaaagtcgacctgttcatcgtcggtggcggcatgataggcagcgcgctggctgccaggctcgcgcctagcggcatgcggatcgccctgctggaaaaccatcaacctgccgcttttgacccctccagtcctccggatttgcgcgtatcggccctgagtcctgcctctatcgactttcttgagcaagcccaggcatggccggcaatacaaaccatgcgcactgcgccgttcaagcgcatgcaggtctgggaaaaccgccaggaccacggcaccatgttcgatgcggcagaagtggatgcgccctggctcggccatatcgtcgagaacaggctggtgcagctcgcctgcctggagattgttgaaggttacgacaacgtcacgctgctatgcccgggcgaaatcgggcagatcgcttatcggccggaaggcagccacatccgcctgaacagtggtcagatttttgaggcaacactcctcatcggtgccgatggcgccaactcccaagtccgcaaagcggccggtattgcattggacagccagcaataccccatgcatgcccttgtcgccaccgttgccatccaaggtggtgaacgcgatatcacctggcagcgcttcacccccgacgggccgcaatcgctgctgcccttgcccggtgactatgcctcactggtgtggtatcaccgcccgagcgaggtacgccgactattgacactagacgacgatgcgctgctggatgcattccgccagcacttccctgctgtattgcctgaaatcacgggattggtgcggcgcggcagtttcccgctcgcacgaagccatgcgcaagcctatgtacgtcctggcgttgcactgatcggcgatgccgcccacaccattcatcctctggcaggccagggggtcaacctcggtttccaggatgctgccgtgctcagcgagacactgctgagagcctggcaaacaggcgctgaccttgccgcactgccccacttacaacgctatgagcgccagcgcaagctggccaacctcgtcatgcagcgcgccatggacgcgttcagctacggcttcagcaacgatgttgcgcccttgcggctgctacgcaacttgggactcaggtttgccgaccacactggtcccatcaagcgtcaagtcatccgctatgcactgggactaggccctcaacccagcctgcctctaccttccggtctatccaagctcctaccatag

SEQ ID NO: 7397 - protein, 419 aa, Methylobacillus flagellatus KT
MMSNTAATVNHSQKVDLFIVGGGMIGSALAARLAPSGMRIALLENHQPAAFDPSSPPDLRVSALSPASIDFLEQAQAWPAIQTMRTAPFKRMQVWENRQDHGTMFDAAEVDAPWLGHIVENRLVQLACLEIVEGYDNVTLLCPGEIGQIAYRPEGSHIRLNSGQIFEATLLIGADGANSQVRKAAGIALDSQQYPMHALVATVAIQGGERDITWQRFTPDGPQSLLPLPGDYASLVWYHRPSEVRRLLTLDDDALLDAFRQHFPAVLPEITGLVRRGSFPLARSHAQAYVRPGVALIGDAAHTIHPLAGQGVNLGFQDAAVLSETLLRAWQTGADLAALPHLQRYERQRKLANLVMQRAMDAFSYGFSNDVAPLRLLRNLGLRFADHTGPIKRQVIRYALGLGPQPSLPLPSGLSKLLP

SEQ ID NO: 7398 - DNA, 1227 bp, Silicibacter sp. TM1040
  CDS (1)..(1227): transl_table=11
atgactgatacgcgtgatatcctgattgtgggcggaggcctgaatggtccgtcgcttgctcttgcgctggcacaggctggccattctgtgaccctgatcgacgcgcttccggcgcccctgcgcgaggacgccgaatttgacggccgttcctatgctctggcgcttgcctcgacgcggctcctgcaacagatcgggatctgggcagttatcgaggatcacgctcaaccgatgaacgagatcaaggttagcgacggcgttgccggtcgcggcccttcgccgcttttcctgcattttgaggaaagcgacctcgacgagggccccatgggctacatggtcgaagatcgctacctgcgccgcgcccttctgaaagcactcgaggccgagccaaaaatcacccagatctcgggccagcctgtgatcgcacagaccgtgagtgcggatgccatcaccgtcactctcgaagatggcacacagctctcgggtgcgcttttggtcggcgcggatggacgtcaaagcggcaccgccgcgcgcgccggcatcaagcgcaccgggtgggattacggccagaccgcactggtctgcgctatctcacatgcgcaacctcacaacggcattgcccatcagttctttatgccgccggggccgcttgcaattctgccgttgccgggcaatcgcagctctattgtctggagtgagactcatgccgaggctgcgcgcattcaggcactttcggatcaggactacctctcggtgctgcgcccccggtttgggtctttcctcggagagatcgatttggaaggcaagcgcttcagctatccgctgaaattgagccttgccaatgccttttatggcgagcgactggccttggtgggcgatgcggcgcatgggctgcacccgatcgcgggccagggactcaatgcggggctgcgcgacatcgccagccttgcagaagttctgaccgatgcagcgcggcgcggtgaggatctcgccagccccttggttctggcgcgctatcaacagtggcgccggttcgacaccacctctctcgcgctagcgacagatgtgttcaacaagctgttttcaaacgacaatcctatcctgcgcgccacccgagatctggggcttggcctcacaaatgcactgcctggcctacgccgaggttttgtgcgcgaagcggcaggactttcgggagatttgccgcgcctgttgcgcgggcgcccgctctga

SEQ ID NO: 7399 - protein, 408 aa, Silicibacter sp. TM1040
MTDTRDILIVGGGLNGPSLALALAQAGHSVTLIDALPAPLREDAEFDGRSYALALASTRLLQQIGIWAVIEDHAQPMNEIKVSDGVAGRGPSPLFLHFEESDLDEGPMGYMVEDRYLRRALLKALEAEPKITQISGQPVIAQTVSADAITVTLEDGTQLSGALLVGADGRQSGTAARAGIKRTGWDYGQTALVCAISHAQPHNGIAHQFFMPPGPLAILPLPGNRSSIVWSETHAEAARIQALSDQDYLSVLRPRFGSFLGEIDLEGKRFSYPLKLSLANAFYGERLALVGDAAHGLHPIAGQGLNAGLRDIASLAEVLTDAARRGEDLASPLVLARYQQWRRFDTTSLALATDVFNKLFSNDNPILRATRDLGLGLTNALPGLRRGFVREAAGLSGDLPRLLRGRPL

SEQ ID NO: 7400 - DNA, 1176 bp, Haemophilus somnus 129PT
  CDS (1)..(1176): transl_table=11
atgaaaatatttgatattgcaattattggtggaggcatggtgggcttggctttagctgccagcttgcgaaatagccctgtgaaaattgctgtaattgaaggatttcctaataaagaaccgattgagcaacttagtaatcgtgtgagtgcaataaatttagccagcgaaaaaatgttgcaaaacttggaagtttggcaagctttattgaatttgagagcgacggcatacgacaaaatggatgtttgggagaaagatagttttgcacaaattcaatttgatacacaaagtttaggactggagcatttagggcatattattgaaaatcacctgattcaaaatcaactttggcaaaaggtaaaaatgcaaaaaaatgtggaaattattaccgcacttccgcatcatttaggactcaccgaaaacaatgcaattttaaccacaaatgatggacaaatgttatcggcaaaattaattgtaggggctgacggagcaaattcttgggtgcgtaaacaagcagatattccgctcatttttcgtgattatggacatcatgctttagtttgcaacgtaaaaacttctgaatcgcataagaattgtgctagacaaatttttaacaaagacagcatcttagctttcttgcctttacatcaacaaaatttatgctcaatagtttggtctttaccgccacaacaagccaatgaactcttaaacgcagaggaaaatgaatttaataaaaacttatctgtagcttttgacaatcgtttaggattatgcgaggtgcgtggagaacgcaaagttataccattaactgcacgttatgcacgtagttttgccaaacatcgcattgtgttagtaggagatgcggctcatactattcaccccttagccggacttggagtcaacttaggttttcaagatgccgttatacttgcacaagaaattaacaaaaatttagctttaagaatggatattggtgaataccgatatttgcgtcattatgaacgctgccagaaaacagcggcagtcaaaatgttagtggcaatgcagggactaaaagaactctttaacggcgataatcccgtgaaaaagttagtacgtggtataggtttaaataccactaaccgatttggtttcgtcaaagaacaaataatgaaacaagcactaggaatatccttttaa

SEQ ID NO: 7401 - protein, 391 aa, Haemophilus somnus 129PT
MKIFDIAIIGGGMVGLALAASLRNSPVKIAVIEGFPNKEPIEQLSNRVSAINLASEKMLQNLEVWQALLNLRATAYDKMDVWEKDSFAQIQFDTQSLGLEHLGHIIENHLIQNQLWQKVKMQKNVEIITALPHHLGLTENNAILTTNDGQMLSAKLIVGADGANSWVRKQADIPLIFRDYGHHALVCNVKTSESHKNCARQIFNKDSILAFLPLHQQNLCSIVWSLPPQQANELLNAEENEFNKNLSVAFDNRLGLCEVRGERKVIPLTARYARSFAKHRIVLVGDAAHTIHPLAGLGVNLGFQDAVILAQEINKNLALRMDIGEYRYLRHYERCQKTAAVKMLVAMQGLKELFNGDNPVKKLVRGIGLNTTNRFGFVKEQIMKQALGISF

SEQ ID NO: 7402 - DNA, 1167 bp, Haemophilus somnus 129PT
  CDS (1)..(1167): transl_table=11
atgcaaaaagatattattgttgttggtggcggtatgattggtgcggcttgtgcgacaggattagctcaattgggattacaaattcacgtcattgaacatcattctctacctgaatttgattcgacatcggagtatgacattcgcatttctgcaattagtgctgcatcagttaatttattgaaaaccctaaaggcatggcagcatatcgaaaaaatgcgtattttcccttatcgaggactggaaacttgggaaattgaaggttttgcaacccaatttcactgccaagatttacagttagcggaacttggatttatggtagaaaataatcttattcaactaggattatggcagacattttcttcctaccataatattactaccaacgtggaaaatgcgattaaaaatgttgaaaagtgcggtaaaaattggcgtatttttttatccaatggagaaagttatcaagcacctctcatcattgcagctgacggtgccaattcacaattacgccaaattgcaggcataggtttgacaggctggcaatatcgacaagattgcatgctcattttagtgaatgtagaacaagatcaacaacatattacttggcaacaattttatccctccggacctagagccttgttaccattacaaaataagcaagcctgtttagtttggtatgacagcccacaaaaaatacgtgaattaaaacagctgtcaaatgaaaaacttgcagaagaaattcatcaagcatttccccctagactgggcaaaataaacgtacaaaaatttgcgacttttgcactaacacgtcgtcatgcacaagattatttcaaacaaggtattgttttagttggcgatgccgctcacacgattaatcctcttgccggacaaggtgtcaatttaggttttaaagacgtcaaagtcctgcttagtgtaattgaaagtgcggtaaaaaataatgaagatttttcaacggatcatgttttacaacgttatcaaaaccgacggaagcctgataatttactgatgcaatcgggtatggatttgttttataaagcctttaaagaagatagcatgccattaaaaatagctcgtaacttggcattactgggtgcaaacaaaatcacgcctcttaaaaaacaagctttgaaatacgcacttggtttgtaa

SEQ ID NO: 7403 - protein, 388 aa, Haemophilus somnus 129PT
MQKDIIVVGGGMIGAACATGLAQLGLQIHVIEHHSLPEFDSTSEYDIRISAISAASVNLLKTLKAWQHIEKMRIFPYRGLETWEIEGFATQFHCQDLQLAELGFMVENNLIQLGLWQTFSSYHNITTNVENAIKNVEKCGKNWRIFLSNGESYQAPLIIAADGANSQLRQIAGIGLTGWQYRQDCMLILVNVEQDQQHITWQQFYPSGPRALLPLQNKQACLVWYDSPQKIRELKQLSNEKLAEEIHQAFPPRLGKINVQKFATFALTRRHAQDYFKQGIVLVGDAAHTINPLAGQGVNLGFKDVKVLLSVIESAVKNNEDFSTDHVLQRYQNRRKPDNLLMQSGMDLFYKAFKEDSMPLKIARNLALLGANKITPLKKQALKYALGL

SEQ ID NO: 7404 - DNA, 1227 bp, Shewanella sp. MR-4
  CDS (1)..(1227): transl_table=11
atgagtcaagcgataagccaaacactgcagcctgaacagacaacctcagacactcgcgtatttgatgtgattttagttggtggcggcatggtgggggcggcgacggccatagggctggcaaagcaaggattacaggtggccgtgattgaatcatttgcccccgaggcttattcccctgagcaggcattagatgtgcgtgtgtcggcgataagcgtggcctctgaacagttgctcgggcagttaggcgcgctcgagagcctgcttaacatgcgtaatgtgccttatctgggcttagaaacctgggagcttgatggctgcattactcaattccatagctcacaaatcggcgcaagccatttagggcatattgttgaaaaccgtttggtgcaacttgccctgtgggagcaaatgcagcaatgggatgcgattaaattgttttgccccgaacgtgtggcgacattttcgcgcctcacagacggggtgagtgtgcacttacaatccggtattcaacttgaggcaaagctgctcatcggagctgatggcgccaactcgcaggtgcgccaatgggcggggattggcatctctgggtgggactatgcccaatcggcgatgctgattaatatccaaaccgcccaaggtcagcaagatgtcacttggcaacaatttacccctaacggcccgcgctcgttattacctctccccggcaatcatgcgtcgttagtctggtatgacgatgccaatcgcattaaacagttaatgcagctgaatcataagcagcttgccgaccaaattcgccaacattttcccgctcgcttagacagcgactttaccgttgaagccaaaggcagttttgccctcacgcgccgccacgcgaatgcctattttaagtcgaatgtggtgattttaggggatgcggcgcacacaattaacccgttggctggccaaggggttaacctcggctttaaagatgtcgaggccttactaacggtaatcaaggctgcattaaccgaggataaaccttggtggtccaccgaggtattaaacgcctatcaagccaagcgttatcgcgataatcagctgatgatgacgaccatggatgtgttttacgcaggctttagtaacgacattctgccacttaaattactgcgtaatggcgcgttaaaactggccaatattaactcccccatcaagcgaaccgtgctgaagtatgcgatgggcctcaattag

SEQ ID NO: 7405 - protein, 408 aa, Shewanella sp. MR-4
MSQAISQTLQPEQTTSDTRVFDVILVGGGMVGAATAIGLAKQGLQVAVIESFAPEAYSPEQALDVRVSAISVASEQLLGQLGALESLLNMRNVPYLGLETWELDGCITQFHSSQIGASHLGHIVENRLVQLALWEQMQQWDAIKLFCPERVATFSRLTDGVSVHLQSGIQLEAKLLIGADGANSQVRQWAGIGISGWDYAQSAMLINIQTAQGQQDVTWQQFTPNGPRSLLPLPGNHASLVWYDDANRIKQLMQLNHKQLADQIRQHFPARLDSDFTVEAKGSFALTRRHANAYFKSNVVILGDAAHTINPLAGQGVNLGFKDVEALLTVIKAALTEDKPWWSTEVLNAYQAKRYRDNQLMMTTMDVFYAGFSNDILPLKLLRNGALKLANINSPIKRTVLKYAMGLN

SEQ ID NO: 7406 - DNA, 1224 bp, Shewanella sp. MR-4
  CDS (1)..(1224): transl_table=11
atgttaagttcacaagcctatgacattgccattgtgggtggcggcatggtgggactcgccaccgcgataggattggcgcaggccaacttgaatgtcgtcgtgatcgatgctcaaagcacccaagccgtgagcggtgagccaaggcttagggtcagcgcgatcaacaaagcgagccaacgtctgctcgagcacctcggcgcttggcactatgtcgatgccagccgcgcgacgccctatcaaaaaatggcggtatgggataaagacggctttggtaaaatcgccttcgatgccagtagcatcagtgaacctagccttggcgccattatcgaaaatgatgccatcagctacgccctcgccaagcgtgccagtgaatttgacaatatcacccatatcgaaaaccaacgcatagagcgtatcgcctttggtgagcgtgaagcttggttgaccttagccaatagcgccgatgccgaaatcgagagcgttagcgccgcactcgtaattgccgctgatggtgctaattcttgggtgcgcgaacaatgtaagatcccgttaaccttctgggattatggccatcatgcgattgtggcgaccattcgcagcgaaatgccgcaccttgccaccgcccgccaagtgtttttgcaggacggcccgctggccttcttgccgttatatgaagacaacctctgctccatcgtctggtcagtgccgccagagcgcgccaccgagttactcgagatggcgccagagcagttcgagcgcaatcttaccgccgccttcgacggtcgcctcggcatttgcaagcttgagagtgaacgccaagcctttccactgcggatgcgctacgcccgccattttgcccgccaccgtttagtgctcgcgggggatgcggcccacaccattcatccattagctggccagggggtaaacctaggcttcctcgatgccgccagcattatcgaagtcatcggcgagctacacgaggcgggtaaagatatcggtgattatgcccagctgcgcgcccttgagcgttggcgcaaggcggatgcgatggagatgattgcggcgatggaaggctttaagcgcctgttcgagggtagcaatccccttaaaaaagccattcgcgatctgggactcaacctcgttgataatgtcgctgggctgaaaacagtgttcatgcaacaggccatgggcaataagtcctcactccccaagttatgtcgctag

SEQ ID NO: 7407 - protein, 407 aa, Shewanella sp. MR-4
MLSSQAYDIAIVGGGMVGLATAIGLAQANLNVVVIDAQSTQAVSGEPRLRVSAINKASQRLLEHLGAWHYVDASRATPYQKMAVWDKDGFGKIAFDASSISEPSLGAIIENDAISYALAKRASEFDNITHIENQRIERIAFGEREAWLTLANSADAEIESVSAALVIAADGANSWVREQCKIPLTFWDYGHHAIVATIRSEMPHLATARQVFLQDGPLAFLPLYEDNLCSIVWSVPPERATELLEMAPEQFERNLTAAFDGRLGICKLESERQAFPLRMRYARHFARHRLVLAGDAAHTIHPLAGQGVNLGFLDAASIIEVIGELHEAGKDIGDYAQLRALERWRKADAMEMIAAMEGFKRLFEGSNPLKKAIRDLGLNLVDNVAGLKTVFMQQAMGNKSSLPKLCR

SEQ ID NO: 7408 - DNA, 1224 bp, Shewanella sp. MR-7
  CDS (1)..(1224): transl_table=11
atgttaagttcacaagcctatgacattgccattgtgggtggcggcatggtgggactcgccaccgcgataggattggcgcaggccaacttgaatgtcgtcgtgatcgatgcccaaagcacccaagccgtgagcggtgagccaaggcttagggtcagcgccatcaacaaggcgagtcaacgtttgctcgagcatctcggcgcttggcactatgtcgatgccagccgtgcgacgccctatcaaaaaatggcggtatgggataaagacggctttggcaaaattgccttcgatgccagtagcatcagtgaacctagccttggcgccattattgaaaatgatgctattagctacgccctcgctaagcgtgccagtgaatttgacaatatcactcacatcgaaaaccaacgcatagagcgtatcgcctttggtgagcgtgaagcttggttgaccttagccaatggcgccgatgctgacattgagagcgtcagtgccgcactcgtgattgccgccgatggtgctaattcttgggtacgcgaacaatgtaagatcccgttaaccttctgggattatggtcaccatgcgatcgtggcgaccattcgcagcgaaatgccgcaccttgccaccgcccgccaagtctttttgcaggacggcccgctggccttcttgccgttatatgaagaaaacctctgctccatcgtctggtcagtgccgcctgagcgtgccaccgaattacttgagatggcgccagagcagttcgagcgcaatcttaccgccgccttcgacggtcgcctcggcatttgtaagcttgagagtgaacgccaagcttttccactgcggatgcgctacgcccgccattttgcccgccaccgtttagtgctcgcgggggatgcggcccacaccattcatccattagctggccaaggggtaaacctaggcttcctcgatgccgccagtattatcgaagtcatcggcgagctacacgaggcgggtaaggatatcggtgattatgcccagctgcgcgcccttgagcgttggcgcaaggccgatgcgatggagatgattgcggcgatggaaggctttaagcgtctgttcgagggcagcaatccccttaaaaaagccattcgcgatctgggactcaacctggtcgataatgtcgctgggctgaaaacagtgttcatgcaacaggccatgggcaataagtcgtcgctgcccaagttatgtcgctag

SEQ ID NO: 7409 - protein, 407 aa, Shewanella sp. MR-7
MLSSQAYDIAIVGGGMVGLATAIGLAQANLNVVVIDAQSTQAVSGEPRLRVSAINKASQRLLEHLGAWHYVDASRATPYQKMAVWDKDGFGKIAFDASSISEPSLGAIIENDAISYALAKRASEFDNITHIENQRIERIAFGEREAWLTLANGADADIESVSAALVIAADGANSWVREQCKIPLTFWDYGHHAIVATIRSEMPHLATARQVFLQDGPLAFLPLYEENLCSIVWSVPPERATELLEMAPEQFERNLTAAFDGRLGICKLESERQAFPLRMRYARHFARHRLVLAGDAAHTIHPLAGQGVNLGFLDAASIIEVIGELHEAGKDIGDYAQLRALERWRKADAMEMIAAMEGFKRLFEGSNPLKKAIRDLGLNLVDNVAGLKTVFMQQAMGNKSSLPKLCR

SEQ ID NO: 7410 - DNA, 1224 bp, Alkalilimnicola ehrlichei MLHE-1
  CDS (1)..(1224): transl_table=11
atgaagatcgattacgaggccgtcatccagggcggcggcatggtgggcctggccctggccctcaccctggcacgggccggcctgccggtggccgtcctggaggcccacaccccgcggcgctggcgccgcgaggacccggtggatcagcgcgtctccgccatctcggtggcctcggagcgctacctgggccggctgggtgcctgggcggacatccgccgcgcccgcgcctgtcccttccacggcatccatgcctgggacggcgagggcggtggcgccatccacttcgacgcccaccgttacggcgagccccacctgggtcatatcgtggagaaccggctgatccagaccaccctctggcagcacctgtcccgacacgacaacgtacgcctgatggtgcccggcagcgtcgagggctgggatgcggagccggagggcctgcgggtacggctgaacgacggtggcgagtgcaccacccggctgctggtgggcgcggacggcgcccgctcgcgcctgcgggagctagccggaatcggccacagcgtgcgcccttacgggcagcacggcgtggtggggacggtctggccggagcaccaccacggcggcatcgcccgccagcgttttctgcccaccgggccgctggccctgctgccgctagccgacggcagttgctccattgtctggtcctgcccggaggcccaggccacggagctgctcgagctgccggaggcgcgctttcgcgaacagctcacccaggccagtgaggccgtgctcgggccgatcaacgcctgcggcccgcgggcggccttcccgctgcggcgcagccacgccaggcgctatatcgaccggcgcctggccctggtgggcgacgccgcccacaccatccaccccctggccggccagggggtcaacctgggcttcatggacgccgccaccctcgccgaggagatgctggcggcccacgagcgtggccgcgacccgggcggccaggcggtgctgcagcgcttccagcgccggcgcctgggcgccaaccacctgatgcagaccggcatggacgccttccactggttgttcgccaacgacctgccaccgctggtggtgctgcgcagcctggggctgagtctcactgaccggctggcgccggccaagtcgctgttcatggcgcgggccatgggactcagcggcgagctgccggcgctggcgcgtccccatccgcagaccggctga

SEQ ID NO: 7411 - protein, 407 aa, Alkalilimnicola ehrlichei MLHE-1
MKIDYEAVIQGGGMVGLALALTLARAGLPVAVLEAHTPRRWRREDPVDQRVSAISVASERYLGRLGAWADIRRARACPFHGIHAWDGEGGGAIHFDAHRYGEPHLGHIVENRLIQTTLWQHLSRHDNVRLMVPGSVEGWDAEPEGLRVRLNDGGECTTRLLVGADGARSRLRELAGIGHSVRPYGQHGVVGTVWPEHHHGGIARQRFLPTGPLALLPLADGSCSIVWSCPEAQATELLELPEARFREQLTQASEAVLGPINACGPRAAFPLRRSHARRYIDRRLALVGDAAHTIHPLAGQGVNLGFMDAATLAEEMLAAHERGRDPGGQAVLQRFQRRRLGANHLMQTGMDAFHWLFANDLPPLVVLRSLGLSLTDRLAPAKSLFMARAMGLSGELPALARPHPQTG

SEQ ID NO: 7412 - DNA, 1218 bp, Pseudomonas aeruginosa UCBPP-PA14
  CDS (1)..(1218): transl_table=11
atgcacgcggatctggtcatcgtcggcgccggcatggtcggtagcgccctggccctggccctggagggcagcggcctggaggtgctgctggtggacggcggctcgctcgacgtggcgccgttcaagccggaggcgccctacgagccgcgggtcagcgcgctgtccgaagccagccggcggattctccagcgcctgcacgcctgggacggcatcgtcgcgcgccgcgccgagccctatcgcgagatgcaggtgtgggatggctccggcaccgggcggatcggcttcagcgccgccagcgtgcacgccgaggtgctcggccatatcgtcgagaaccgggtggtgcaggacgctctgctggaacgcctgcacgattccaccaccggcctgctggccaacgcgcgcctggaacagatgcgccactccggtgacgactggctgctgaccctggccgacggccgtcagttgcgcgcgccgctggtggtcgccgccgacggcgccaactcggcggtacgccgcctggccggctgcgccacccgcgaatgggattacctgcaccacgccatcgtcaccagcgtgcgctgcgagaacgcgcaccgcgcaaccgcctggcagcgcttcaccgacgacggcccgctggccttcctgcccctgccggaccgcggcgacgaacactggtgctcgatcgtctggtcgaccaccccggaacaggcagaacggctgatggcgctggacgaggatggcttccgcgctgccctcggcgaagctttcgaacggcgcctgggcgccatcctgcatgccgaccggcgcctgtgcatcccgctgcgccagcggcacgccaagcgttacgtcgagccgggcctggcgctggtcggcgacgctgcgcacaccatccacccgctggccggacagggcgtgaacctgggtttcctcgatgcggcggtgctgtccgaggttctgttgcatgccctggagcgcggcgaacggcttgccgacgaacgcgtgctgagtcgcttcgagcggcggcggatgccgcacaacctgggcatgatgacggcgatggaaggcttcgaacgcctgttccaggccgaccggttgccgctgcgctggctgcgcaacgccggcctgcgcctggtcgacggccatcacgaggccaaggcgctgttcgtccgccaggcgcttggcctcagcggcgacctgccggcgctggcacgagtctga

SEQ ID NO: 7413 - protein, 405 aa, Pseudomonas aeruginosa UCBPP-PA14
MHADLVIVGAGMVGSALALALEGSGLEVLLVDGGSLDVAPFKPEAPYEPRVSALSEASRRILQRLHAWDGIVARRAEPYREMQVWDGSGTGRIGFSAASVHAEVLGHIVENRVVQDALLERLHDSTTGLLANARLEQMRHSGDDWLLTLADGRQLRAPLVVAADGANSAVRRLAGCATREWDYLHHAIVTSVRCENAHRATAWQRFTDDGPLAFLPLPDRGDEHWCSIVWSTTPEQAERLMALDEDGFRAALGEAFERRLGAILHADRRLCIPLRQRHAKRYVEPGLALVGDAAHTIHPLAGQGVNLGFLDAAVLSEVLLHALERGERLADERVLSRFERRRMPHNLGMMTAMEGFERLFQADRLPLRWLRNAGLRLVDGHHEAKALFVRQALGLSGDLPALARV

SEQ ID NO: 7414 - DNA, 1227 bp, Shewanella sp. ANA-3
  CDS (1)..(1227): transl_table=11
atgagccaagcgataagccaaacacagcaaccaagccagacaaccacagctactcagctatttgatgtgatccttgtcggtggcggtatggtgggcgcggcaacggctatcgggctggcgaagcaaggcttacaggtggcggtgattgaatcatttgcccccgaggcttattcccccgagcaggcattagatgtgcgcgtgtcggcgataagtgtggcctccgaacagttactcgaacaactcggcgcgctcgatagtctgcttaacatgcgtaatgtgccttatctgggcttagaaacctgggagcttgatggttgcattacccaattccatagctcacaaattggcgcgagccatttagggcatattgttgaaaaccgcttggtgcaactcgccctgtgggagcaaatgcagcaatgggatgcgattaaattgttttgccccgagcgtgtggcgacattttcgcgcctcgcagacggggtgagtgtgcacttacaatccggtatcaagcttgaggcaaagctgctcatcggggccgatggcgccaattcgcaggtgcgccaatgggcggggattggcatttcggggtgggactatgctcaatcggcgatgctgattaatatccaaaccgcccaaggccagcaagatgttacttggcaacaatttacccctaacggcccgcgctcgttattacctctacccggcaatcatgcgtcgttagtctggtatgacgatgccaatcgcattaaacagttaatgcagctgaatcataagcagcttgccgaccaaatccgccagcattttcccgctcgcttggacagtgactttaccgttgaagctaagggcagctttgccctcacgcgccgccacgcgaatgcctattataagccgaatgtggttattttaggggatgctgcgcacaccattaacccgttggcgggccaaggggttaacctcggctttaaggatgtcgaagccttactggcggtcatcaagactgcattaaccgaggataaaccttggtggtccaccgaggtattaaatgcctatcaagctaaacgttatcgcgataatcagctgatgatgacgaccatggatgtgttttacgcaggctttagtaatgacattctgccacttaaattactgcgtaacggcgcgttaaaactggccaatattaattctcccatcaagcgaaccgtgctgaagtatgcgatggggctcaattag

SEQ ID NO: 7415 - protein, 408 aa, Shewanella sp. ANA-3
MSQAISQTQQPSQTTTATQLFDVILVGGGMVGAATAIGLAKQGLQVAVIESFAPEAYSPEQALDVRVSAISVASEQLLEQLGALDSLLNMRNVPYLGLETWELDGCITQFHSSQIGASHLGHIVENRLVQLALWEQMQQWDAIKLFCPERVATFSRLADGVSVHLQSGIKLEAKLLIGADGANSQVRQWAGIGISGWDYAQSAMLINIQTAQGQQDVTWQQFTPNGPRSLLPLPGNHASLVWYDDANRIKQLMQLNHKQLADQIRQHFPARLDSDFTVEAKGSFALTRRHANAYYKPNVVILGDAAHTINPLAGQGVNLGFKDVEALLAVIKTALTEDKPWWSTEVLNAYQAKRYRDNQLMMTTMDVFYAGFSNDILPLKLLRNGALKLANINSPIKRTVLKYAMGLN

SEQ ID NO: 7416 - DNA, 1224 bp, Shewanella sp. ANA-3
  CDS (1)..(1224): transl_table=11
atgttaagttcacaagcctatgacattgccattgtgggtggcggcatggtgggactcgccaccgcgataggattggcgcaggccaacttgaatgtcgtcgtgattgatgcccaaagcacccaagccgtgagcggtgagccaaggcttagggtcagcgccatcaataaggcgagtcaacgtttgctcgagcacctcggcgcttggcactatttagatgccagccgcgcgacaccctatcaaaaaatggcggtatgggataaagacggctttggcaaaattgccttcgatgccagcagcatcagtgagcctagccttggcgccattatcgaaaatgatgccatcagctacgccctcgctaagcgtgccagtgaatttgacaatatcacccatatcgaaaaccaacgtatagagcgtatcgcctttggtgagcgtgaagcttggttgaccttagccaatggcgccgatgccgaaatcgaaagtgtgagtgccgcactcgtaattgccgccgatggtgccaattcttgggtgcgcgaacaatgtaagatcccgttaaccttctgggattatggccaccatgcgatcgtggcgaccattcgcagcgaaatgccgcaccttgccactgcccgccaagtctttttgcaagacggcccactggccttcttgccgttatatgaagacaacctctgctccatcgtttggtcagtgccgccagagcgcgccaccgagttactcgagatgacgctagatcagttcgagcgcaatctcaccgccgccttcgatggccgccttggcatttgcaagcttgaaagtgaacgtcacgccttcccgctgcggatgcgctacgcccgtcattttgctcgccaccgtttagtgctcgcgggggatgcggcccacaccattcatccattagctggccaaggggtaaacctaggcttcctcgatgccgccagcattatcgaagtcatcggcgagctacacgatacgggtaaagatatcggtgattatgcccagctgcgcgctcttgagcgttggcgcaaggccgatgcgatggagatgattgcggcgatggaaggctttaagcgtctgttcgaggggagcaatccccttaaaaaagccattcgcgatctgggactcaacctagttgataatgtcgctgggctgaaaacagtgttcatgcaacaggccatgggcaataagtcctcactccccaagttatgtcgctag

SEQ ID NO: 7417 - protein, 407 aa, Shewanella sp. ANA-3
MLSSQAYDIAIVGGGMVGLATAIGLAQANLNVVVIDAQSTQAVSGEPRLRVSAINKASQRLLEHLGAWHYLDASRATPYQKMAVWDKDGFGKIAFDASSISEPSLGAIIENDAISYALAKRASEFDNITHIENQRIERIAFGEREAWLTLANGADAEIESVSAALVIAADGANSWVREQCKIPLTFWDYGHHAIVATIRSEMPHLATARQVFLQDGPLAFLPLYEDNLCSIVWSVPPERATELLEMTLDQFERNLTAAFDGRLGICKLESERHAFPLRMRYARHFARHRLVLAGDAAHTIHPLAGQGVNLGFLDAASIIEVIGELHDTGKDIGDYAQLRALERWRKADAMEMIAAMEGFKRLFEGSNPLKKAIRDLGLNLVDNVAGLKTVFMQQAMGNKSSLPKLCR

SEQ ID NO: 7418 - DNA, 1182 bp, Actinobacillus pleuropneumoniae serovar 1 str. 4074
  CDS (1)..(1182): transl_table=11
atgaaatcagcagatattgtgattattggcggcggtatggtcggtctggcattagcggcactcctaaaaaataccgatagtcaaattaagattattgaaaagcaaatcccgcaaacctcggaaactttttcgaatcgagtcagtgcgattaacgcaaccagtgaaaaaatgcttgagcaagtcggtgcattgcagcttattcaaaccgagcgtttatcgccttatcaaaaaatgtcggtatgggaacaagacagttttgctcacattgagtttgataatagcgatccgagtattcggcaactcggtttatctcagctgggatttattattgaaaataatcaaattcaatcggcactatggcaacaagtaagccgacaagataatgtagaaattatcttaagcgagccgaaaaccgtcggcatcaacgaaaatggtgctttcctgaccttagcgaataatgaaatgatttccgctaaattagtggtcggggcggacggtgccaattcttggcttcgccgacaaatgcatattccgcttgtaagcaaagattacgagcaaaccgcattagtatgtaatgtcaaaaccgttgaacctcatcataatatcgctcgccaaattttctctccgaagagcattttggcatttttaccgttagccgatgaaaatttatgctctatcgtctggtctttaccgccggaaaaagcgcaacaattacaacattgcgaagtgcaacaatttaatcgggagctcaccattgcttttgacaaccgcttaggcttaatcgaattacaaagcgaacgagcgatttacccgcttaccgcacgctatgcgagagatttcgctcaacctcgctttgctttaatcggggatgcggcgcatacgattcatccgcttgccggtttaggcgtgaacttaggttttgccgatgcgatcacccttgcccaagagatcaaacaacatttaacgctcggccatgatatcggcgaatatcgtcatttacgtcgtttcgaacgaatccgtaaaacggaagcaataaaattactggctgcgatggaaggcttaaaacagctgtttcagggaagtcaccccgtcaaaaaactgatacgaggcgtaggtttatccgcaaccaatcaactaccggtattaaagaaattattgattgctcaggcggtgggtatttga

SEQ ID NO: 7419 - protein, 393 aa, Actinobacillus pleuropneumoniae serovar 1 str. 4074
MKSADIVIIGGGMVGLALAALLKNTDSQIKIIEKQIPQTSETFSNRVSAINATSEKMLEQVGALQLIQTERLSPYQKMSVWEQDSFAHIEFDNSDPSIRQLGLSQLGFIIENNQIQSALWQQVSRQDNVEIILSEPKTVGINENGAFLTLANNEMISAKLVVGADGANSWLRRQMHIPLVSKDYEQTALVCNVKTVEPHHNIARQIFSPKSILAFLPLADENLCSIVWSLPPEKAQQLQHCEVQQFNRELTIAFDNRLGLIELQSERAIYPLTARYARDFAQPRFALIGDAAHTIHPLAGLGVNLGFADAITLAQEIKQHLTLGHDIGEYRHLRRFERIRKTEAIKLLAAMEGLKQLFQGSHPVKKLIRGVGLSATNQLPVLKKLLIAQAVGI

SEQ ID NO: 7420 - DNA, 1182 bp, Xylella fastidiosa Ann-1
  CDS (1)..(1182): transl_table=11
atgaaccgaactcagcgaccggatgtactcatcactggcggcggcgttgtcggcgccagcagcgccctggcattggcgaaaacagggttacacgtcgccttgattgaaaaatacgaaccaccgcgttggcaagcaacggttccggatctgcgtgtctacgcatttgccccggacagtgccgcactcctgcgcaccttcaacgtatggccgaccgtgtgcgcgacacgcgcccagccataccatcacatgcggatctgggacagtggcggagcggatgaattgcacttcgacgctgccacattgggccgcgaacaactcggctggatcgtcgagaacgcactcctagtcaaccagttgtggtccgcacttgcggatgccggcgtacaactgcattgccctgcacggatcaccgccctagagcaagacaccgacagagtgcgtttacgcttggaggacggtcggcgactcgaagcacgcctggccatcgctgccgacggcgccgactccaccttgcgtcaattggcgcacctgccagtacaccgacatgactatgcacaacgcagcattgtcgcctttgtcgcaaccgaacacccacaccaagccaccgcctggcaatgctttctaccaagcggaccattggcattgctgccatttactgatgagcgcagctcaatcgtctggacgctccccgatgttgaagcgcaacgcctcctgacactggacgaaacaacattcgcacgcgaactcaccactgccttcggtgggcgcctaggacacatacagctcatctcaccacgcaccgcattcccattgcgccgccaactggccaccgactacatcgccggtcgggtactgacactcggtgacgccgcacatgtcgtccacccactggccggacagggcgtcaacctcggcttgcgcgatgtaactgcattgcaaaccctgatccaacaggcacacacgcgccatgttgactgggccacaccgcaccgcctgcaacgctgggcacggacacgccgcagtgataacaccctcgccgcctacacgttcgatgccattaaccgggtattctccaacgacgcatttcacctcaccctgctacgtggccgggtactgggcttggtcgaccgcctgccaccgctcgtcaacgccctatggcgtcgtgcctcaggggtgaattga

SEQ ID NO: 7421 - protein, 393 aa, Xylella fastidiosa Ann-1
MNRTQRPDVLITGGGVVGASSALALAKTGLHVALIEKYEPPRWQATVPDLRVYAFAPDSAALLRTFNVWPTVCATRAQPYHHMRIWDSGGADELHFDAATLGREQLGWIVENALLVNQLWSALADAGVQLHCPARITALEQDTDRVRLRLEDGRRLEARLAIAADGADSTLRQLAHLPVHRHDYAQRSIVAFVATEHPHQATAWQCFLPSGPLALLPFTDERSSIVWTLPDVEAQRLLTLDETTFARELTTAFGGRLGHIQLISPRTAFPLRRQLATDYIAGRVLTLGDAAHVVHPLAGQGVNLGLRDVTALQTLIQQAHTRHVDWATPHRLQRWARTRRSDNTLAAYTFDAINRVFSNDAFHLTLLRGRVLGLVDRLPPLVNALWRRASGVN

SEQ ID NO: 7422 - DNA, 1227 bp, Sulfitobacter sp. EE-36
  CDS (1)..(1227): transl_table=11
atggattttgatacagatatcgcaatcgtcggtggggggctgaatggcccgacacttgccttggctttggcgcagatcgggctgcgggtcacgttgatcgacaggctgcccgctgccacgcgggaagatgcggcgtttgacgggcgatcctatgcgctggcgttgacctcgacacggatgctcggggcgctcgggatttgggataatgtgaaaccccacgcgcaaccgatgctcgagatcaaagtgacggacgggcgcgcgggcgaaggcccctcccctttcttaatgcatttcgatcacgcagagatcgaagaagggccgatgggccatatggtcgaggaccgccacctgcggcgcgccttggcagaagcggtgagcgctgaggcccgcatcacgcggttggacggcgaaacggtcatcgcgcaagacgccgccccggcgggcgtcaccctgacactggaagatggtaagaccctgcgcacgcgtctggttgtcggcgcggatggccgcgcctcgggcaccgccacgcgggcggggatcaaacgcatcggctgggattatgcgcaaaccgcgctggtctgcgccatcgcccatgaaaagccgcatcacggggtcgcgcatcagttctttatgccccccggtccgctggcgatcctgccgctgaccgaaaaccggtcctccatcgtctggagcgagaccgccgccaacgcagcgcatatccacgcgctgccggatgcgggatacctcgacgtgcttcgcccgcgctttggtgattttctgggagagatttcccttgccggtgcgcggtacacttacccgctgagcctgtcgctggcgcattcgatggtggcaccgcgtgtcgcgctgctgggggatgccgcacatggggtgcacccgattgccggtcaggggttgaatgctggcatgcgcgatgtcgccgcgctggcagaggtgatcgctgatgcacaacggcgcgggcaggatgtcggcagcaccacggtgcttgagcaatatcagctgtggcgtcgctttgataacaccgcgctggcattggcgacggacagcttcaaccggctgttttccaacgacaacccgctgctgcgtcttgcacgtgatgtggggatggcggcgattaacgccctgcccgatgcccgtcgcggtttcatgcgcgaggcggcggggctgacgggcaccctgccccgtctgatgcagggtaaggcgctttag

SEQ ID NO: 7423 - protein, 408 aa, Sulfitobacter sp. EE-36
MDFDTDIAIVGGGLNGPTLALALAQIGLRVTLIDRLPAATREDAAFDGRSYALALTSTRMLGALGIWDNVKPHAQPMLEIKVTDGRAGEGPSPFLMHFDHAEIEEGPMGHMVEDRHLRRALAEAVSAEARITRLDGETVIAQDAAPAGVTLTLEDGKTLRTRLVVGADGRASGTATRAGIKRIGWDYAQTALVCAIAHEKPHHGVAHQFFMPPGPLAILPLTENRSSIVWSETAANAAHIHALPDAGYLDVLRPRFGDFLGEISLAGARYTYPLSLSLAHSMVAPRVALLGDAAHGVHPIAGQGLNAGMRDVAALAEVIADAQRRGQDVGSTTVLEQYQLWRRFDNTALALATDSFNRLFSNDNPLLRLARDVGMAAINALPDARRGFMREAAGLTGTLPRLMQGKAL

SEQ ID NO: 7424 - DNA, 1215 bp, Oceanicola batsensis HTCC2597
  CDS (1)..(1215): transl_table=11
atgacacatgacagcgatatcctgatcgtcggcggcgggctcaacggcccggcgacggcgcttgcgctggcccgcgcggggctgagcgtcaccgtgatcgacgcgctgcctgcggatgtccggtccgatgccgggttcgacgggcgcggctatgcgctggcgctggcctcggtccggctgctgcggcggatcggcgtctgggaccgcgtggccgagaacagccagccgatgctggagatcaaggtgacagacggccgggccggcgagacgccctcgcccttcctgatgcatttcgaccatgccgagatcgaggaaggcccgatgggccagatgatcgaggatcgctacctgcgccgggcgctggccgaggccatggccgcggaggcgcggatcacggtgctgaacggcgacacggtggtcgcgcagtccgtcgccgccgacggggtccgcatcgacctttcgtcgggccggtcgctgagcggcaggctgctgatcggctgcgacgggcggcgcagcgggaccgcggaacgggccgggatcaggcggacgggctgggactacggccagaccgcgctggtctgtgccatcgcgcatgagcggccgcatgacggcgtggcccaccagttcttcctgccgccgggcccgctggcgatcctgccgctgcccggcaacagaagctcgatcgtgtggagcgaggcgacggaccgcgcggcggccttccaggcgctgccggacgaggattacctgaccgtcctgcggccccggttcggcgatttcctgggcgacatccggctcgagggggggcggttcacctatccgctgaacctgaccgtcgcgaacagtttcgtgggcgagcggctcgcactggtgggcgatgccgcgcacgggatgcacccgatcgccggacaggggctgaatgccgggctgcgcgatatcggcgcgctggcccaggttctgaaagaggcccgcacccggggcgaggacatcggcgcgttgcccgtcctgcgccgctatcaggagtggcgccggttcgacaccgccgctcttgccatggcgacggacttttccaaccggctgttttcgaacgacagctcagcgatccgcctggtccgggatctcggcatgggcgcgatcaacgcgctgccccggctgcggcgcgggttcatgcgcgaagcggcggggctgacgggcgacctgccggagctgatgcgttga

SEQ ID NO: 7425 - protein, 404 aa, Oceanicola batsensis HTCC2597
MTHDSDILIVGGGLNGPATALALARAGLSVTVIDALPADVRSDAGFDGRGYALALASVRLLRRIGVWDRVAENSQPMLEIKVTDGRAGETPSPFLMHFDHAEIEEGPMGQMIEDRYLRRALAEAMAAEARITVLNGDTVVAQSVAADGVRIDLSSGRSLSGRLLIGCDGRRSGTAERAGIRRTGWDYGQTALVCAIAHERPHDGVAHQFFLPPGPLAILPLPGNRSSIVWSEATDRAAAFQALPDEDYLTVLRPRFGDFLGDIRLEGGRFTYPLNLTVANSFVGERLALVGDAAHGMHPIAGQGLNAGLRDIGALAQVLKEARTRGEDIGALPVLRRYQEWRRFDTAALAMATDFSNRLFSNDSSAIRLVRDLGMGAINALPRLRRGFMREAAGLTGDLPELMR

SEQ ID NO: 7426 - DNA, 1164 bp, Pseudoalteromonas tunicata D2
  CDS (1)..(1164): transl_table=11
atgaaaaatgacgttattattgtaggtggtggcatggttggtgcggcaatggcactgaaacttgctaagcaaggctgtatggtcactgttattgagcaacaacaagttgattttaacgccgtgcttgccagtgaagatctcgatttacgggtatccgctattaatcgtttttctgagcaattatttgctgaacttggtattttggataacttacttaccaagcgtcatgccccttatcgtcgtttagcagcatttgaacaagtcaaacaaacattattatttgatgccaaagacatcgattatgattaccttggtcatatcattgaaaataaattgattcaagctgcactttggcaggcatttgcttcacataatattaccgtcaaaagtgacctaggtaagttaaatcgcattgaacaagtcgaatctcgtattactttacactatggcaagtcggaattaaccgctgatttagtcattgctgccgatggtggccaatcgattactcgtcaattggcggggattggtactacaggttggcaatatcagcaaagttgcatgggaatattaattaagcttgatgcaccgcaacaagatattacgtggcagcagtttcaagcaacagggccggttgcttttttacccttgcaagcgccctatgctaatttaatttggtatcactcaggcacgcagttagcaaaattggcggcgcttaatcctgggcagttaaaacaaaaagtgattgagcatttcccaaccttaccaggagattttgaggtgattgaacaggctgtttttccgctcacgcgtcagcatgcaaatcaatatgtgcaagggcgtttagtgttagtgggtgattctgcccatactattaatccacttgcggggcagggcgttaatttaggctttaaagatgtacaacagttagctacatgcttggcaaacaaactagatgtaggtgataaagcggccttgttgcaatatcagcgttaccggaaaaccgctaatttagtaatgatgtcggcaatggatgcctgctaccttggtttttctaatcaaattccaccgttaaaatggctgcgtaataaagtgcttgcaactgcagagcgctcagggccattaaaaaactgggttttaaagtacgcgataggtgaaaaactctaa

SEQ ID NO: 7427 - protein, 387 aa, Pseudoalteromonas tunicata D2
MKNDVIIVGGGMVGAAMALKLAKQGCMVTVIEQQQVDFNAVLASEDLDLRVSAINRFSEQLFAELGILDNLLTKRHAPYRRLAAFEQVKQTLLFDAKDIDYDYLGHIIENKLIQAALWQAFASHNITVKSDLGKLNRIEQVESRITLHYGKSELTADLVIAADGGQSITRQLAGIGTTGWQYQQSCMGILIKLDAPQQDITWQQFQATGPVAFLPLQAPYANLIWYHSGTQLAKLAALNPGQLKQKVIEHFPTLPGDFEVIEQAVFPLTRQHANQYVQGRLVLVGDSAHTINPLAGQGVNLGFKDVQQLATCLANKLDVGDKAALLQYQRYRKTANLVMMSAMDACYLGFSNQIPPLKWLRNKVLATAERSGPLKNWVLKYAIGEKL

SEQ ID NO: 7428 - DNA, 1161 bp, Photobacterium sp. SKA34
  CDS (1)..(1161): transl_table=11
atgaagcagtatgatgtcatcgttgcaggtggcggtatggttggggctgcaaccgcgcttggcttagcgaagttaggtttagacgttgccgtattagaaggctttgcacctcgaccttttgcaaatacacaaccgatggatttacgtgtttccgcaatttcgcctcattccgttgcattattagatcgcttgggcgcatggaatgaggtgctcaacatgcgtttgtgtccttttaaacgattggaaacgtgggaaaccccagaatgtcgtacacgctttaatgctgacgatatgggattagaacaactaggctatattgttgaaaaccgcctgttgcaacttgcactttggcagcagttcgacaatatcgataacttgacgttatattgtccatcaaaaatggtttcaacaacaccgattgaaaatggctatatcgttgagttggaaaatactcaacagctacagtgccggttattaattggtgccgatggtgctaactctcaagtgcgccaacaagccgatattggtattactgcgtgggattaccgtcaacactgcatgctcattaatatagaaacagcattgccgcaacaagatattacgtggcagcagtttacgccagcaggccctcgttcattcttaccgttatctggacatcaaggttcgttagtatggtatgacagccctgaacgcattcggcgcctatcacatatgacttccggacagttacagacagagatctctgccgtttttcctgaagagcttggtgagttcagtgtggttgatcatggatcttttccattaacacgccgtcacgcacaaacctattacaagccaaatgtcgttttattaggtgatgctgctcatacgattaacccattagcaggccaaggtgtgaatcttggctttaaagatgttgatgttttactacaagaaatagaagcagcaggagagcattgggctgagagttcggtacttgataaatatcaacgtcgtcgtcgtcctgataaccttgtaatgcaaacagggatggattttttctatgtagcatttagtaataatatcgcgccattaaagtttattcgtaatgcagggcttcgtttagctgatggggctgccggtataaaaaaacaagtattgaaatacgctatgggtctttag

SEQ ID NO: 7429 - protein, 386 aa, Photobacterium sp. SKA34
MKQYDVIVAGGGMVGAATALGLAKLGLDVAVLEGFAPRPFANTQPMDLRVSAISPHSVALLDRLGAWNEVLNMRLCPFKRLETWETPECRTRFNADDMGLEQLGYIVENRLLQLALWQQFDNIDNLTLYCPSKMVSTTPIENGYIVELENTQQLQCRLLIGADGANSQVRQQADIGITAWDYRQHCMLINIETALPQQDITWQQFTPAGPRSFLPLSGHQGSLVWYDSPERIRRLSHMTSGQLQTEISAVFPEELGEFSVVDHGSFPLTRRHAQTYYKPNVVLLGDAAHTINPLAGQGVNLGFKDVDVLLQEIEAAGEHWAESSVLDKYQRRRRPDNLVMQTGMDFFYVAFSNNIAPLKFIRNAGLRLADGAAGIKKQVLKYAMGL

SEQ ID NO: 7430 - DNA, 1269 bp, Neptuniibacter caesariensis
  CDS (1)..(1269): transl_table=11
atgtcaaatcagatgcatgcggatgttgtaatcgtcggtgccggaatggttgggttaaccctggccgcagcgatggccccttctgggatgaaaattatcgttctggagcagagaaagggggatccccagggattttctgattgggttcgcgcgcagcagtctgagaactttgatcctcgtgtcagtgcgctgacttgtgcatcacagcagatccttacggcggtcggggcttgggaaaaaatggcatccttccgattgagcccgtacaccgatatggatgtctgggatggcgaaggcaccgggaaaatccatttttccgcgcaagatctgcacgaacaggctctggggcatatagttgaaaaccgagttaccttggcagggctgctggcaacggtggctgagctggataatgtgcaactggtaacgggcgttgagctggttaaggcagatttgagcgctagttctttaaaaacgttggaacttagtgatcagcgctgtatcgaaacgtcgctgttggtcgccgctgatggtgcattgtctaaaacccggcagatggcaggtttaccaatgctggagtgggactatggtcatcatgcgatcgtgacgacagtgaaaaccagcgtggatcatcaacaaacggcctggcagcgatttactgatgatggccctttagcgttgttgcctctttccagtgatgatggcaaccattactgctcgattgtctggtcgacctcgcctggccatgcgaaagcgttgatgactttgtctgatgaggatttttgtcaggcactaggggccgcgtttgagcatgttctgggcgatatcctggaaactgatcagcgtagtgtttttccgctgcgtcagcgtcatgctcaacactatgttaaatcgggttttgtagttattggtgatgcggcgcataccatacaccctctggcaggtcagggggtgaaccttggtctgttggatgcggcgcagctggcagaaaccttaatggcggcctatgcacgtggtgaggcactgggatcattatcagtactgcgccgttatcaacgtgaaaggcattcggaaaatattcagatggcggccacgatggagggcttcaaacgactcttcgccagccgaaacccggttgctgtactggctagaaatatgggaatgaactggttagatgggctgggtgcgattaaaaaccacctggttcaggaggcgatggggctttccggaaaaggtcctgcgttggcgcagagatcatttaaagattcataa

SEQ ID NO: 7431 - protein, 422 aa, Neptuniibacter caesariensis
MSNQMHADVVIVGAGMVGLTLAAAMAPSGMKIIVLEQRKGDPQGFSDWVRAQQSENFDPRVSALTCASQQILTAVGAWEKMASFRLSPYTDMDVWDGEGTGKIHFSAQDLHEQALGHIVENRVTLAGLLATVAELDNVQLVTGVELVKADLSASSLKTLELSDQRCIETSLLVAADGALSKTRQMAGLPMLEWDYGHHAIVTTVKTSVDHQQTAWQRFTDDGPLALLPLSSDDGNHYCSIVWSTSPGHAKALMTLSDEDFCQALGAAFEHVLGDILETDQRSVFPLRQRHAQHYVKSGFVVIGDAAHTIHPLAGQGVNLGLLDAAQLAETLMAAYARGEALGSLSVLRRYQRERHSENIQMAATMEGFKRLFASRNPVAVLARNMGMNWLDGLGAIKNHLVQEAMGLSGKGPALAQRSFKDS

SEQ ID NO: 7432 - DNA, 1221 bp, Neptuniibacter caesariensis
  CDS (1)..(1221): transl_table=11
atgaatacacgatatgacgttgtgatcgttggtggcggcatggtcggtgcgaccatcgcttgtgctctgggaaacagtaatttatctgtagcagtgcttgaacatgcttaccctaaagccttcgagtcggaccagccaaacgatcttcgtgtttcagctatcagtgtcgcttccgagaatatcctgaaaatggtcggagcctgggaagggattctgtcacgccgtagttgtccctaccgccgtatgaaggtttgggaagcagatgaagtcaaagcggctacagaatttgtatccgatcatatcggtcatgagtatctgggccatatcgttgaaaaccgagtgattcagctagcgctgctagagcgcttaaaggcttttgataatatcgacctgatctgcccagctaaggttgaagagatcgattattcgccgggaagtagccttattcgtctcgatgatgagcgggagattatcggtaggctgttgatcgccgcagacggtggggattctaaggttcgccaggccgcgggcatcggcgtaacaaaatgggattacgagcagtttgccttggtggcttcggtgacaaccaactatccgcaacaggatatcacctggcagcagtttaccccgactgggcctttagcttttctaccgctcagtggtgagaatgcatctctggtctggtacaacacgccagacaatgtaaagcgattgatgcagctggatgacgaccagtttatgcaagagcttaccgcaaccttcccggataccctgggttctctggataagctattgatgcgggggtacttcccgttacgccgtcagcatgcgcaggaatatgtgttagagggcttagccttagcgggcgattctgcgcacatgatcaatccgttagcaggtcagggggtcaatatcggtctgctggatgccgcctcactggcagaggtaattctaaaagcggccagaaccggcgaagatatcactgaacttgagctgctcaaagagtatgagcagcagcgtcgccaacataacctgctgatgatgcagacgatggatgcattctatcgaatcttcagtaatcaaatcggtcctcttaaactgatccgcaacatcggcctgggccttgccgagcgggtaacgcctgctaaaaacaaagtgacccgatttgctatggggctggaagggccgctaccggcattggcaagattagaagagatctag

SEQ ID NO: 7433 - protein, 406 aa, Neptuniibacter caesariensis
MNTRYDVVIVGGGMVGATIACALGNSNLSVAVLEHAYPKAFESDQPNDLRVSAISVASENILKMVGAWEGILSRRSCPYRRMKVWEADEVKAATEFVSDHIGHEYLGHIVENRVIQLALLERLKAFDNIDLICPAKVEEIDYSPGSSLIRLDDEREIIGRLLIAADGGDSKVRQAAGIGVTKWDYEQFALVASVTTNYPQQDITWQQFTPTGPLAFLPLSGENASLVWYNTPDNVKRLMQLDDDQFMQELTATFPDTLGSLDKLLMRGYFPLRRQHAQEYVLEGLALAGDSAHMINPLAGQGVNIGLLDAASLAEVILKAARTGEDITELELLKEYEQQRRQHNLLMMQTMDAFYRIFSNQIGPLKLIRNIGLGLAERVTPAKNKVTRFAMGLEGPLPALARLEEI

SEQ ID NO: 7434 - DNA, 1230 bp, Oceanobacter sp. RED65
  CDS (1)..(1230): transl_table=11
atgcaatacgatgtaatcattatcggtggcggcatggtgggttccgcgttggccttagcattaagtaatgcaatgcaaaccgggcaaatgcctgaacaaaaaattgccttgattgagcccagcccggcgactatgccacagcaaaaaatcgaacatgtgaccgatgtagatatgcgcgttagtgcaatccatcgtggtaaccaggcctttttacaaagcataggagcttggcagggtattcccaagcagcgccttagtgcttatgacaaaatgcgagtatgggacggaattggtacagggcatattcaatttgatgcgtctgaaatgaccgagccatgcttggggcatattatcgaaaaccgatgtgtcgcagcggcactcattaacgagatacagcgtcagggaaaaattcgcttgatcactcaaaagacaactgagatcgagcgcctcagcgaagaaaatgaaagctattacgtacacttggataacgatgatttgttaaaaacatccacgattgtggctgctgatggagcgcgttcgtttattcgtcagtgggctgaatttgaaactcgcgagtgggattatgagcatcatggattagtgtgcactattcgcactgaacagtcccatcaactatgcgcatggcagcgatttacaccagatggtgtacttgcgtttttaccattgccgcaagatgacaatggacaagagaacctagtatccattgtttattcctgttctccagaaaaagcagattcattgttagctctgcccgatgacgagttttgtcagaccctctctggcgaatttgaatatcaattgggtcgcgttttagaggtgggaccgcgggccgctatcccgctacgtcagcgtcatgccaaaacgtatgtgaagtcgggagtcgtcttgattggtgacgctgcacataccattcatccgctggcgggtcagggggtaaatcttggcttgatggatgccaatgtgcttgcgcaagagtggatccgagcaagcagaaggggtcttgcgctgaacgatggattgactttgcaacggtttgagcgccgacgtatgggcgagaatctgagtatgatggctactatggaaggctttaagcgcttattcgctccgcaaccaccggccattacttggatgcgcaattggggaatgactaaggttaatcaagcacccatggtgaagcaccatattatgcagctggctatggggttataa

SEQ ID NO: 7435 - protein, 409 aa, Oceanobacter sp. RED65
MQYDVIIIGGGMVGSALALALSNAMQTGQMPEQKIALIEPSPATMPQQKIEHVTDVDMRVSAIHRGNQAFLQSIGAWQGIPKQRLSAYDKMRVWDGIGTGHIQFDASEMTEPCLGHIIENRCVAAALINEIQRQGKIRLITQKTTEIERLSEENESYYVHLDNDDLLKTSTIVAADGARSFIRQWAEFETREWDYEHHGLVCTIRTEQSHQLCAWQRFTPDGVLAFLPLPQDDNGQENLVSIVYSCSPEKADSLLALPDDEFCQTLSGEFEYQLGRVLEVGPRAAIPLRQRHAKTYVKSGVVLIGDAAHTIHPLAGQGVNLGLMDANVLAQEWIRASRRGLALNDGLTLQRFERRRMGENLSMMATMEGFKRLFAPQPPAITWMRNWGMTKVNQAPMVKHHIMQLAMGL

SEQ ID NO: 7436 - DNA, 1182 bp, Alteromonadales bacterium TW-7
  CDS (1)..(1182): transl_table=11
atgatgaaaaacatgactcaaaataatgtgatagtggttggcggcggtatggttggtgcggcaatggcaataaaattagcacaacagggtaagtcagtgcgcattatcgaaaaacacctaatcgatccgtttcatgttttgagtaatgacaacgttgatataagagtatcagctattaatcgtttttctgaaaagttactcgatggtttaggggctatgcccattttaagaaaaggccggattgcgccataccaacagttagaagcttttgaacgcggcgacgataaattgttatttgattgcgccgacattaataccacgcatttgggtcacttaatcgaaaacagtttaatacaagccagtttatggatgcagtttgagcaatacgatattgaagtcatcgagcaaaaacaggttgttagtaaaattgaacaaaatgccgattcgattaccttggtatatggcgagcaacgttataccgccagcttagtggttgcagccgatggcggacaatcacaattacgaactaaagcaaatattggtgtaaccggttggcagtaccagcagcaatgtatgggcgtacttattaaattggacgcacctcaacaaataaagacatggcagcaatttacgccatcaggcccattggcttttttacctatgcaagcaccttacgctaatttaatttggtacgacgatgccaacacattaaacacatttaaaggattagatggagcacaattaaaaagtcatattttggctaagttccctggccttgtaggtgattttgaagtgcaaagtcatgcagtgtttccaattactcgtcaacatgctaataattattcttgtggtcgtttggtgttagtaggcgatgctgcgcacactattaatccactggctgggcagggcgttaacttgggcttccaggacgtggtcgctttagccactatattgaatgatgcaaccgacgtcggatgcgcgttaaagctgcaagagtacgaacgtgcccgccgaaaagctaacttattaatgatgagtatgatggatgcctgctattttggtttttcaaaccaaatagcgccactaaaatgggcgcgtagccaatttttaaaaatggctaacaatactggggtggtaaaaaactgggtattaaagtacgcaattagcggtgaatttagctaa

SEQ ID NO: 7437 - protein, 393 aa, Alteromonadales bacterium TW-7
MMKNMTQNNVIVVGGGMVGAAMAIKLAQQGKSVRIIEKHLIDPFHVLSNDNVDIRVSAINRFSEKLLDGLGAMPILRKGRIAPYQQLEAFERGDDKLLFDCADINTTHLGHLIENSLIQASLWMQFEQYDIEVIEQKQVVSKIEQNADSITLVYGEQRYTASLVVAADGGQSQLRTKANIGVTGWQYQQQCMGVLIKLDAPQQIKTWQQFTPSGPLAFLPMQAPYANLIWYDDANTLNTFKGLDGAQLKSHILAKFPGLVGDFEVQSHAVFPITRQHANNYSCGRLVLVGDAAHTINPLAGQGVNLGFQDVVALATILNDATDVGCALKLQEYERARRKANLLMMSMMDACYFGFSNQIAPLKWARSQFLKMANNTGVVKNWVLKYAISGEFS

SEQ ID NO: 7438 - DNA, 1221 bp, marine gamma proteobacterium HTCC2143
  CDS (1)..(1221): transl_table=11
atgagtgcgcaagccgttgtttacgacattgttatcgttggtgccggaatagtaggcagtgctttagcctgtgctttggccaagagctcgttcaatatagcgatcattgaggctcaggaacgagtgattgatcggaatgaacaggccactagcgttgatggttttgatgtgcgagtgagcgctatcaccattgcctcgcaacagttgctaaaggatatcggcgcctgggaaatcattgccgagaatcgtctgagcccataccggcatatgcatgtgtgggatgcagagggaaccggcagtatcgattttgacgctgatgatatcaaccagccagcactgggtcatattgttgaaaataaagtgactgcggatgcattgacgcaatgcatgaataggcagactaatctccatcggattgtgccggcaatattggaagaaatcgaaccgctgcagaacggagcttacctactgactctcggcgatggtcgccagctacaaacatcgttgcttgtcgctgcagatggggctaattccaaagtccgtgccttggaacacatcgctatgcgcgagtgggattataatcatcatgccattgtcgcaacggtaaaaacggaattgtctcatgggcacacagcaaggcagcgttttctgcccgagggtccactggcatttcttccgctatcgtcagcgcaagatgacacgcattactgctctattgtttggtcggcgattccatcatatgcagaaaatttaatggcgctaaccgatgacgagtttaccgaggcactagctgccgcgttcgaatatcaactggggagtatttccgcggtaagccgccgattcagttttccgctgagacagcggcatgtagtcgattatataaagcccgggcttgcactggttggtgacgcagctcataccattcatccgttggcgggacagggtgtcaatttagggttgatggatataaaaacgctgagtgaagagttgttaagatcacagcaacgtggtcttagccctggcagtattgctgtgctggagcgctatcagcggcgtcgcaagggtgctaatttggccatgatggcaggtatggacggattgaagcgactattttcggaaactacgctgccggttcgatgggcaagaaattcagggctgcgctggcttgataaaagtaaaatgttaaaacgtcaaatcatgaagcgggcaatgggcttgtag

SEQ ID NO: 7439 - protein, 406 aa, marine gamma proteobacterium HTCC2143
MSAQAVVYDIVIVGAGIVGSALACALAKSSFNIAIIEAQERVIDRNEQATSVDGFDVRVSAITIASQQLLKDIGAWEIIAENRLSPYRHMHVWDAEGTGSIDFDADDINQPALGHIVENKVTADALTQCMNRQTNLHRIVPAILEEIEPLQNGAYLLTLGDGRQLQTSLLVAADGANSKVRALEHIAMREWDYNHHAIVATVKTELSHGHTARQRFLPEGPLAFLPLSSAQDDTHYCSIVWSAIPSYAENLMALTDDEFTEALAAAFEYQLGSISAVSRRFSFPLRQRHVVDYIKPGLALVGDAAHTIHPLAGQGVNLGLMDIKTLSEELLRSQQRGLSPGSIAVLERYQRRRKGANLAMMAGMDGLKRLFSETTLPVRWARNSGLRWLDKSKMLKRQIMKRAMGL

SEQ ID NO: 7440 - DNA, 1200 bp, marine gamma proteobacterium HTCC2080
  CDS (1)..(1200): transl_table=11
atggggtctttggagcgtgctgatgtcgtgattgctggtgctggtattgcaggcttgtccctcgccttggctttgtcccaacaagggatgaaaattattattctagaggcgagtatccagccctctacgccctcgttagcttcggatcttgcggggtgggattctagggtaagtgcattgacaccctcatcgagcgcttggttgggtgagcggggagtttggcaggacatggagcatcatcgagtcggtccctacaccgatatgagggtctgggatgggtcgggcacagggcgcattgccttttctgcggaatcgctagacgtgccactgctgggtcatatcgttgaaaatagagtcacagttcaagcactgctcaaaggcgttcaacaacagaccaacattagggtgttttgggaagagggtttgaaggctgccgatttttcacagccggacagcgtctcagtggagactcagaaggggcgacatctaacagcggctttgttggtaggagccgatggtgctcgatcacgaactcgggatttggcaggtcttgccgttcggacgtggtcgtaccatcagcatgccattgttgccacggtaaggctggccgaagagcatcaaaaaacctgctatcaagcttttttaaatacggggcctttggccttacttccgctgtctgatccgcggttgtgttccattgtttggtccctagacgaccagcaatgggagccgttacagagcttggacgatgaggcttttattgctcagcttaatcgcgcgttggcatcgaatatgcctgcagtagaggctgttggcaggcgaggagtttttcctctgcgtcagtgtcatgccgttgattacgttcatcaaggaattgccttggtgggggatgcagcacacagtattcatcctctcgctggccagggtattaacctaggattaaaggacgttgctgttctggtagaagagatcgggcaggcctggcagcagggaatggcgttgggcagcgagcgaaccttgcgtcgttaccagcggcgcagaaagactgataacttgttgatgatgtcagcgatggaagcttttaagcgagggtttgggtctactaatccagccataagagtggctcgtaacatgggcttatcttggactgatgctgccatacccctcaaaaattggcttgctcgacaggctttgacttga

SEQ ID NO: 7441 - protein, 399 aa, marine gamma proteobacterium HTCC2080
MGSLERADVVIAGAGIAGLSLALALSQQGMKIIILEASIQPSTPSLASDLAGWDSRVSALTPSSSAWLGERGVWQDMEHHRVGPYTDMRVWDGSGTGRIAFSAESLDVPLLGHIVENRVTVQALLKGVQQQTNIRVFWEEGLKAADFSQPDSVSVETQKGRHLTAALLVGADGARSRTRDLAGLAVRTWSYHQHAIVATVRLAEEHQKTCYQAFLNTGPLALLPLSDPRLCSIVWSLDDQQWEPLQSLDDEAFIAQLNRALASNMPAVEAVGRRGVFPLRQCHAVDYVHQGIALVGDAAHSIHPLAGQGINLGLKDVAVLVEEIGQAWQQGMALGSERTLRRYQRRRKTDNLLMMSAMEAFKRGFGSTNPAIRVARNMGLSWTDAAIPLKNWLARQALT

SEQ ID NO: 7442 - DNA, 1236 bp, Marinobacter sp. ELB17
  CDS (1)..(1236): transl_table=11
atgactcaagcatttgatattgcggttgtcggcgccggcatggtgggtgcagcccttgcgacaggcctgggccgcaacggttttcgcgtggcgctgattgacttcgctgacgctcccgaatttgtgccaggcagcacgccggatattcgcgtgtccgcccttagcgccggcagtgaacgctacctgcaaggcctaaaggcctgggacaacgttctggccatgcgcgccacgccctatcgccgcctggcggtgtgggaccagtcctcgcacccgcttacccggctgctgccaaagcccctggcacgggtggaattcaacgccgacaagttgggcgccagccaccttggccacatcgtagaaaacagcgttacccaggcggctctctggcaggccgcgagtacccagccgaacatcactttaatgccgggcgttgcggttacaaacctcacccagaaccacgatcacgctcagctagacctgagtaacgctaccgccattacggcaaccctggtggtgggcgccgacggtgcccaatcccgggtgcgcgatctggccggcattggcgtcacccgcagccaatacgaccaacaggccatggtgatgtctgttcgttaccgcggcgcggtggaagacatcacctggcagggctttttaccctctggcccgcgggcctttttgccgttgcacacagccggcgaagaatttccgggcgaaagctggggctcgctggtgtggtacgatgctcccgcccggcttgcacagctcaaagccatgcccatcgaacagctgatggccgaaattcaacaggaatttccccaaccgctgccagagctaacgcatatagacacccgcgccagcttccccattgcccgccagcacgccaaacattattaccagggccgtgtggtattggccggcgatgcggcccacaccatcaacccgctggccggccaaggcgtgaacctgggttttcaagacgcccaatgcctgcaacagctattgatcgttgcccgcaacaacggcaccgacctggccgaccccgacttactgagccaatacgaacaccagcgccgaccggctaaccgccgcatgatgctggctatggatgtcttttatcatctgttcagcaaccgcgttccgcctctgcacctgttgcgcaatctgggcctgggcgccgcgcaggcactgcccttcgcccgcaaccgcgtagcccgttacgccatgggtctggattga

SEQ ID NO: 7443 - protein, 411 aa, Marinobacter sp. ELB17
MTQAFDIAVVGAGMVGAALATGLGRNGFRVALIDFADAPEFVPGSTPDIRVSALSAGSERYLQGLKAWDNVLAMRATPYRRLAVWDQSSHPLTRLLPKPLARVEFNADKLGASHLGHIVENSVTQAALWQAASTQPNITLMPGVAVTNLTQNHDHAQLDLSNATAITATLVVGADGAQSRVRDLAGIGVTRSQYDQQAMVMSVRYRGAVEDITWQGFLPSGPRAFLPLHTAGEEFPGESWGSLVWYDAPARLAQLKAMPIEQLMAEIQQEFPQPLPELTHIDTRASFPIARQHAKHYYQGRVVLAGDAAHTINPLAGQGVNLGFQDAQCLQQLLIVARNNGTDLADPDLLSQYEHQRRPANRRMMLAMDVFYHLFSNRVPPLHLLRNLGLGAAQALPFARNRVARYAMGLD

SEQ ID NO: 7444 - DNA, 1260 bp, Marinobacter sp. ELB17
  CDS (1)..(1260): transl_table=11
atgactgaagcgcacagctcaaaaacgcccgctgtggcggacattatgattgttggtggcggtatggtgggatcggccttggctttggggttggcgcaacagggttggcaagttgttctggttgagtccagccccctggcgaagttgcaggccgctgcgcagccggcgaccggtgttgatgacttcgaaccccgtgtgagcgccgtctccatggccagccagcggttgttggaagggcttggtgcttgggcagaagtggccgcgggccgtcactgcccttaccagacgatgacagtgtgggacgccgaaggcacggggcgcatagaattcgatgccgcagaaatgcgcgccgaagcgctgggcacgattgtcgaaaatcgccatattgtgcggtccctgtttaatgctttggaagccagcccggcgaccatttttagcggcgccaaggtggctggctggctggcgaacgggccggatggggagggtggaaatgcacccggtatttgcctggaagatggccagcacctgcgggcgcgattggtggtagccgcagacggcgcgcaatcacggttgcgtcagttagttggcctgcctacccgcgaatgggattatgatcaacaggccattgtggccacggtgcgcagcaaacaggtgcaccagtacaccgcgcggcaaagtttctcccgcactggcccgctggcatttctgccgttgcaggctgacaacggcgacgaacatttctgttcgattgtgtggtctcaggacacgcttgaagcccggcgcctgatggcgctggatgacgtcgctttcaacgccgaactggcgagggcaatcgagctgccggaggattcggttgaagcgatttcccgtcgctttgcctttcctctgcgccagcgccacgccatgaattacacagcgccaggcttcgcgctggtgggcgacgccgcgcacagtattcatccgctggcgggccagggtgccaacctgggttatggcgacgtggcggtattgctggaggaattaaagcgtgcccgcaagctgggcctgaaccccggagatgctctggtgcttgggcgctaccagcgccgccgcaaatcggaaaatttaaccatgatggcagccatggaaggtttaaagcagctgtttggccgcgacgaactgccgttacggtggctgcgcaatcagggcatgaactggcttaaccagttggcacccctgaaaaaccgactggccgccgaagccatggggctaagggactaa

SEQ ID NO: 7445 - protein, 419 aa, Marinobacter sp. ELB17
MTEAHSSKTPAVADIMIVGGGMVGSALALGLAQQGWQVVLVESSPLAKLQAAAQPATGVDDFEPRVSAVSMASQRLLEGLGAWAEVAAGRHCPYQTMTVWDAEGTGRIEFDAAEMRAEALGTIVENRHIVRSLFNALEASPATIFSGAKVAGWLANGPDGEGGNAPGICLEDGQHLRARLVVAADGAQSRLRQLVGLPTREWDYDQQAIVATVRSKQVHQYTARQSFSRTGPLAFLPLQADNGDEHFCSIVWSQDTLEARRLMALDDVAFNAELARAIELPEDSVEAISRRFAFPLRQRHAMNYTAPGFALVGDAAHSIHPLAGQGANLGYGDVAVLLEELKRARKLGLNPGDALVLGRYQRRRKSENLTMMAAMEGLKQLFGRDELPLRWLRNQGMNWLNQLAPLKNRLAAEAMGLRD

SEQ ID NO: 7446 - DNA, 1215 bp, Erythrobacter sp. SD-21
  CDS (1)..(1215): transl_table=11
atgacagacaagcgcgacctgctcatcctcggcggcggcctcgtcggcaccacactggcgctggcggcggcgaaacaggggctttcgagccacctcgtcgaccgggccgacccggcagacctgaccgcagagggcttcgacgggcgcgcttcggcgatctcgaccgccagctggcgcctgttccgcaacatcggcctcgccgaaatcctcgaagaacacggctccccgatcgaagcgattgcggtcgtcgaccagatgaagccgggccggatcgatttccgccccgaaccgcatgaaggcacgctgggccggatgttcgccaaccgccagctgcgcatcgccctgttcgaagccgccgagaacgagccgctgatcgccatgcacgcgccggtcgaggtcgccagtcgccaccgcgacgacttcaccgccagcgccacgctgggcgacggcacggtgctggaagccgatctcctcgtcggcgcggaagggcgagggtcgcccacgcgcgaggaagaggggctcaagatggcgagttgggattattcgcaccgcgcgatcatcaccgggctcaaccattccaggccgcatgaaggcgtggcgtgggagatcttctacgaggacggccccttcgcgctcctccccatgctcgacggccccgatggcaagcaccgcagcgcgctggtgtggacggtggacgagaaggacgccgccggcgtgctcaagctgtccgaccgcgccttccttgccgaagtcgagaaacgcatgggcgacattcttggccgcctcgaactcaacagcggacggtcctcctatccgctcagcttccagcacaccgcgcggatcgtgggcgagcgcatggcgctggtcggcgacagcgcccacggcatgcacccgattgcgggacagggccttaaccttggcctgcgcgatgtcggcgctttggtcgaagtgctgggcgatgcccgccgtctcggcctcgacctcggcgatgcgcaggtgctcgagcgttacgagaagtggcgcgcgctcgattccctcatggtcatgggcgcgaccgacacgctcacccgcctgttcggggtgccgggtaagaccgcgagcgcggttcgccgcttcggcatggccggagtccagcgttcgggctggctcaagcgtttcttcatggacgaggcgcgcggcgtttcgggcgatgtgcccgagctgatgaaggcctga

SEQ ID NO: 7447 - protein, 404 aa, Erythrobacter sp. SD-21
MTDKRDLLILGGGLVGTTLALAAAKQGLSSHLVDRADPADLTAEGFDGRASAISTASWRLFRNIGLAEILEEHGSPIEAIAVVDQMKPGRIDFRPEPHEGTLGRMFANRQLRIALFEAAENEPLIAMHAPVEVASRHRDDFTASATLGDGTVLEADLLVGAEGRGSPTREEEGLKMASWDYSHRAIITGLNHSRPHEGVAWEIFYEDGPFALLPMLDGPDGKHRSALVWTVDEKDAAGVLKLSDRAFLAEVEKRMGDILGRLELNSGRSSYPLSFQHTARIVGERMALVGDSAHGMHPIAGQGLNLGLRDVGALVEVLGDARRLGLDLGDAQVLERYEKWRALDSLMVMGATDTLTRLFGVPGKTASAVRRFGMAGVQRSGWLKRFFMDEARGVSGDVPELMKA

SEQ ID NO: 7448 - DNA, 1218 bp, Moritella sp. PE36
  CDS (1)..(1218): transl_table=11
atgcaatcttatgatattgcggttgttggtggtggcatggttggtcttgcttttgctgcagcattaaaggaaaccacccttaagatcgtggttatcgaaggtaatgaatttgatcgcgaattaggtgaattacctgaattacgtgtcagtgcactgagtcgtgccagccaaaacatattacaaaatttagatgcctggactggtatcgaaagccgccgttatcaagcgtacaacgccatgcaagtttgggatcgtaatggctttgggcatatcgaatttgacggcgacggactaatgaccgacaccttaggtcatttagttgaaaacaaagtgatccaattagcgctgttagaacaaatcgaaaaagccagcaacattaccttattaaccggtacccgtattcgtaaattaacccgcagcgatgatgctgcttggttaaccctagaagatcaagaacccgtgtatgcgaaactgattgttggtgccgatggcgctaattcatggacgcgttcacaagtggatattccgctgaccacctgggattataatcaccatgctatcgtcgcgaatatccgcactgttgaaccgcatcaatcttgcgcgcgtcagatctttaatccagaaggcccactcgcgtttttaccgttatggcaaccggatctgtgttcaattgtgtggtcattaccaccagatcgagccaccgaactgttagcaatggacgacgctgagttcaacaaacaactgaccgtggcttttgatggtcgtttaggactgtgtaaaattgaaggccagcgtcaggcattcccacttaaaatgcgttatgcccgtagctttgctagcgatcgcgtggcattgattggcgatgcggcgcataccattcatccattagcagggcagggcgtaaaccttggtttgttagatgcggcgagtttggcgcagtgtgtattagaaaatcacctcgccaacaaagatatcggcacccatgcccatctgcgtaaatttgagcgctggcgtaaagccgaagcggcagtgatgatctcaagcatggaaggcttaaagcgattatttagtggaggtcatccggcgaaacgtattttccgagatattggcttaaccttatccaatacattacctgggctaaagcaaagctttattaaacgtgccatgggcttggatggtgagttacctgaactggctaaatcagactataaacgttaa

SEQ ID NO: 7449 - protein, 405 aa, Moritella sp. PE36
MQSYDIAVVGGGMVGLAFAAALKETTLKIVVIEGNEFDRELGELPELRVSALSRASQNILQNLDAWTGIESRRYQAYNAMQVWDRNGFGHIEFDGDGLMTDTLGHLVENKVIQLALLEQIEKASNITLLTGTRIRKLTRSDDAAWLTLEDQEPVYAKLIVGADGANSWTRSQVDIPLTTWDYNHHAIVANIRTVEPHQSCARQIFNPEGPLAFLPLWQPDLCSIVWSLPPDRATELLAMDDAEFNKQLTVAFDGRLGLCKIEGQRQAFPLKMRYARSFASDRVALIGDAAHTIHPLAGQGVNLGLLDAASLAQCVLENHLANKDIGTHAHLRKFERWRKAEAAVMISSMEGLKRLFSGGHPAKRIFRDIGLTLSNTLPGLKQSFIKRAMGLDGELPELAKSDYKR

SEQ ID NO: 7450 - DNA, 1164 bp, Thauera sp. MZ1T
  CDS (1)..(1164): transl_table=11
atgaaattcgacctcatcatcgtcggcggcggtctcgccggggccgcgcttgcggtagcgctgcgccgtagcgcactgcggatcgccgtgatcgaacatgctgtgccgcgccgccccgaaggctgggacgcccgcgtctacgcctacagcccggtgagcgcacgcttcctggaccagcttggcgtgtgggcccatctggaccaccaacgcctcgctgaagtcgccgagatgcgtatccacggcgatgcgggcggcgagctcgtattttcggcctacgacagcggactcgaggagcttgcctggatcggcgagtccagcttggttcatgtcgaaatctgggagagcctcaagcgccagcacaacgtcacgctgttctgtccagcggcgccggaggcgctcgagatcgacgaagatgcggcgacgttgcgcctgggcgacggtcgcagcctgaaagccgcgttggtcgtcggtgcggacggacgcgactcctgggtacgcgaacgcgccggaatcgccgcgacgatcacgccctacggcgagcgcggcgtggtggccaacttcgtctgcgagcgccccagtcgcggtgtcgcttaccagtggttccgcgccgacggcgtgttggcttggctgcccctgcccgggcgtcacatgtccatggtgtggtccgcgcccgacgcgttcgccgacgagctgctcgggctcgaggccgaggagttctgcgcgcgcgtggagggggctggcggccgcgcgctcggcaagctcgagctcgccggccagcgcgccgcttttccgctgcgtctgatgcgcgtggaagagacggtgcgcccaagggtggcgctgatcggagatgccgcgcatgcgatccacccgctctcgggacatggcatcaacctcggctttcaggatgcgaaggcgctggcggaggtgctcgacgcgctaccgtcctggcaggacgcaggcgatctttcggtgctgcggcgctatgcgcgcatgcgtgcggaagagcccttcctgctgcagtacacgacgcatgccctgagtcgcttgttcgggcgccaggatcccctctcggcgaccctgcgcaatctcgggatgaacctgaccgggcgggtcccggtcttaaaaaatgcgctggtgcgctacgctgccaacggtcgcttctga

SEQ ID NO: 7451 - protein, 387 aa, Thauera sp. MZ1T
MKFDLIIVGGGLAGAALAVALRRSALRIAVIEHAVPRRPEGWDARVYAYSPVSARFLDQLGVWAHLDHQRLAEVAEMRIHGDAGGELVFSAYDSGLEELAWIGESSLVHVEIWESLKRQHNVTLFCPAAPEALEIDEDAATLRLGDGRSLKAALVVGADGRDSWVRERAGIAATITPYGERGVVANFVCERPSRGVAYQWFRADGVLAWLPLPGRHMSMVWSAPDAFADELLGLEAEEFCARVEGAGGRALGKLELAGQRAAFPLRLMRVEETVRPRVALIGDAAHAIHPLSGHGINLGFQDAKALAEVLDALPSWQDAGDLSVLRRYARMRAEEPFLLQYTTHALSRLFGRQDPLSATLRNLGMNLTGRVPVLKNALVRYAANGRF

SEQ ID NO: 7452 - DNA, 1260 bp, Cyanothece sp. PCC 8801
  CDS (1)..(1260): transl_table=11
atgacctcggctcaactcgaatcttccctatccctcactaccccaaccttaacctgtgacctggctattgtaggaggaggaattgtcggtgcaaccctagccgcagccctcaaagaatctgggttaaacattatcataatagaagctcaaacccaacccaaagcagcaagcaaaccccaagcttatgccctttccttgctttcgggacggatttttgagtcgattggggtctggaagaaaatactgccccagattggaaattttagcgcgattcgcctttccgatgccgatcatcccgaagtggtcaaattccaaaccagtgacctcggaaccgagcatttaggctatgtgggggaacatcgggtcattttagccgcgttacaagacgaaatcgcccattttcctcaaattcaatggctctgtcctgctgaagtgttaaaagtcgagtatcaggacaaagcagcgagtttaacggtgaaaattgacggaaaataccagaaaattgacactaaattagtgattggagccgatggagcgcgatcgcccattcgtcaagcggcgggaattaacacccaaggctggaaatattggcagtcttgcgtcgcttttaccattaaacaccatgccccgcgtaatgacatcgcttttgaacggttttggtattcaggacccatggggatcttaccgctaccaggcaatcggtgtcaaattgtgtggacagccccccacgctcaagccaaagaaatcctcgaattagacgaaaaaacctttttagcgcggttatacgaacggacgggaggacttttaggggaattggagttagtgagcgatcgctttctctttcctgtacaattgatgcaaagtgagcgatataccaagtctagactcgctttagtgggggatgctgcccattgttgccatcctttgggaggacaagggttaaatcttggtattcgggatgcagcagcgttagcagacgtcttgcaaactgcccatcagcaaggggaagatattggagaattagccgtcttaaaacgctatgaacgctggcgtaaacaggaaaactgggtcattttaggctttactgactttttagatcgcctattttctaatcagtggtggctgttaatgggggtgcgtcggttaggattgtggttactcaatagtattccttttgtcaagcgtctttctttgcaattaatgacaggattactgggaaaaatgccccaattagtccgaaaaaattatccaacaggttaa

SEQ ID NO: 7453 - protein, 419 aa, Cyanothece sp. PCC 8801
MTSAQLESSLSLTTPTLTCDLAIVGGGIVGATLAAALKESGLNIIIIEAQTQPKAASKPQAYALSLLSGRIFESIGVWKKILPQIGNFSAIRLSDADHPEVVKFQTSDLGTEHLGYVGEHRVILAALQDEIAHFPQIQWLCPAEVLKVEYQDKAASLTVKIDGKYQKIDTKLVIGADGARSPIRQAAGINTQGWKYWQSCVAFTIKHHAPRNDIAFERFWYSGPMGILPLPGNRCQIVWTAPHAQAKEILELDEKTFLARLYERTGGLLGELELVSDRFLFPVQLMQSERYTKSRLALVGDAAHCCHPLGGQGLNLGIRDAAALADVLQTAHQQGEDIGELAVLKRYERWRKQENWVILGFTDFLDRLFSNQWWLLMGVRRLGLWLLNSIPFVKRLSLQLMTGLLGKMPQLVRKNYPTG

SEQ ID NO: 7454 - DNA, 1245 bp, Cyanothece sp. PCC 7424
  CDS (1)..(1245): transl_table=11
atgactgagcaagcgctaaattatcctccctcaaaggctgaaagtaatctagactatgacctagttatagttgggggtggtatcgtcggagcaaccctagccagtgcattaaaagcttctgggctgaaaattggcattattgaagcgcaaccccccgaaaaagccagcgctagacgacgagcttacgctttatccctaatgtcaggacggattttagaagggataggagtttgggataaaatattaccacatattggcaaatttagcaaaattcgtctttctgacggcactcatccacaagtagttaaattttacactacagatctcgcaacagaatatttaggctatgtaggagatcaccaagttattttaactgccctacaagaatttattgctgaatgtcctaatattaactggttatgtccggctcaactaatgagtgtagactatcaacagtctgaagcaactttaaccctaaaaattgccgaaaaagaacatcaaattcggacaaaattagtcatcggagcagatggagcgcgatcgcaaattcggacttctgccggcatcactactagaggatggaaatattggcagtcttgcgtcacctttaccattaaacatcaagcccctcaaaatgatgttgcttttgagagattttggccgactggcccgatggggattttacccttacccgacaaccgatgtcaaatcgtctggactgctccccatgctcaagctaaagctttacaagacctcgatgaacaagaatttttagctaaattagactatcataccggcggacagttgggtcagttagaattagtcagcgatcgctatttattccccgtccaactgatgcagagcgatcgctatattaaacctagattagccttagtgggagatgctgcccactgttgtcatcctgtaggaggacaagggttaaatttaggcattcgagatgcagccgctttagcccaaatcttgcgggaagcccaccaaaaaggagaagatataggaacgctcaaggtacttcaaccctatcaaaattggcgtaaacgggaaaatttagccattcttggggtaacagacttattagaccgagtgttttctaatgcttggttgccagtagtggcggtacgtcgcttaggaatttggatgatctgccatctgccttttctaaaaatctttgctttacaagtgatgacagggttgaaagggaaaactcctcaactagcagaaaattaa

SEQ ID NO: 7455 - protein, 414 aa, Cyanothece sp. PCC 7424
MTEQALNYPPSKAESNLDYDLVIVGGGIVGATLASALKASGLKIGIIEAQPPEKASARRRAYALSLMSGRILEGIGVWDKILPHIGKFSKIRLSDGTHPQVVKFYTTDLATEYLGYVGDHQVILTALQEFIAECPNINWLCPAQLMSVDYQQSEATLTLKIAEKEHQIRTKLVIGADGARSQIRTSAGITTRGWKYWQSCVTFTIKHQAPQNDVAFERFWPTGPMGILPLPDNRCQIVWTAPHAQAKALQDLDEQEFLAKLDYHTGGQLGQLELVSDRYLFPVQLMQSDRYIKPRLALVGDAAHCCHPVGGQGLNLGIRDAAALAQILREAHQKGEDIGTLKVLQPYQNWRKRENLAILGVTDLLDRVFSNAWLPVVAVRRLGIWMICHLPFLKIFALQVMTGLKGKTPQLAEN

SEQ ID NO: 7456 - DNA, 1590 bp, Oryza sativa subsp
  CDS (1)..(1590)
atgctctccagaggaagatgtttcccggcggcgagtcgaatccggccgctggtcagggccttctgcgacgcgccgcctttgctccaggatgcggccgccggggcgcccagctcgcaggatcacacagagaagggtgatgatgtgaaagctagacccgacgagctcgacattgctatcgttggtggaggcatggtgggattggctgttgcttgtgcattgtccaatatgccattgactaaacatctgagggttggcatcatcgatagtaatcctgcattgaagtcaagaaattatctgaagaaagatggtgtacctgattcgagggtcagtactattactcccgcgaccatatccttcttcagagatattggcgcatgggatcatgttcaacagcaaagacacgctttctttggtaaaatgcaggtgatataccttgcttgtcctgatgaaatgatttgttctgtatgggattacactggactgggttacacaaggtatagtgcaagagatgtgggaaaagaatatctcggatgtgtggtggagaacaaggtgctttgcaactcactgctgttacggttacaggaggaaaatggagacattgaaaagatgatctaccctactagactgatttctcttgctttaccatcaaagagcagacaagcaccaacaagggaagcaatatccagtggttaccctccagaagaattaaatcgcagcaatttagttaaacttgagctaagtgatggacaaactttatattcaaaactagtggtaggagctgatggttccaagtccaatgtaaggcaaacagcaggcataaaaacaacagggtggaattatcctcaaagtgcaattatttgtacagtggagcatattaccgaaaacgattgtgcatggcagaggtttctcccttctggtccaattgctctacttccaataggtgacaactacagcaatattgtgtggacaatgagcccagaggagtcattgcgccataagtcaatgagtcctgaagattttgtgaagtctgtgaacaatgcattggattttggttacggtccacatccacactctggtaatcttgactattacatggaaaagttattttctgacattggaagtactgctacatctacaaaggaatgctttgaggtacctccaaaagcaatcggggtagtctctgagagaatggcatttccattgtcgctgaagcattcacatgattatgtttcaaaaaggatagcactagtcggtgatgcagctcatacagtccatcccttagctggccaaggtgtcaacttaggttttggagatgcagctgctttagcaaaagttatcgctgatggagtttctgtgggtgctgattttggggatatttccatgctcaaaaggtatgagaatgatcgcaaagctgccaatgttgcaatggcagcgctgctagatggtttccagaagatgtactctgttgattttggtcccctcaatgtgcttagggctgcagcgtttcatggtgcccagtacatatcaccgctgaagaagaacataatctcgtatgcaatgggcgacgcgaaatggccgctgttttcatag

SEQ ID NO: 7457 - protein, 529 aa, Oryza sativa subsp
MLSRGRCFPAASRIRPLVRAFCDAPPLLQDAAAGAPSSQDHTEKGDDVKARPDELDIAIVGGGMVGLAVACALSNMPLTKHLRVGIIDSNPALKSRNYLKKDGVPDSRVSTITPATISFFRDIGAWDHVQQQRHAFFGKMQVIYLACPDEMICSVWDYTGLGYTRYSARDVGKEYLGCVVENKVLCNSLLLRLQEENGDIEKMIYPTRLISLALPSKSRQAPTREAISSGYPPEELNRSNLVKLELSDGQTLYSKLVVGADGSKSNVRQTAGIKTTGWNYPQSAIICTVEHITENDCAWQRFLPSGPIALLPIGDNYSNIVWTMSPEESLRHKSMSPEDFVKSVNNALDFGYGPHPHSGNLDYYMEKLFSDIGSTATSTKECFEVPPKAIGVVSERMAFPLSLKHSHDYVSKRIALVGDAAHTVHPLAGQGVNLGFGDAAALAKVIADGVSVGADFGDISMLKRYENDRKAANVAMAALLDGFQKMYSVDFGPLNVLRAAAFHGAQYISPLKKNIISYAMGDAKWPLFS

SEQ ID NO: 7458 - DNA, 1242 bp, Magnetospirillum gryphiswaldense
  CDS (1)..(1242): transl_table=11
atggatatgtccatgatcgcatcttctccgccatcccttcaggccgacgtcctcatcgtcggcggtggtccggtcggcggcctgaccgcctgcgccctggcccaggccggtcttgccgtcgccttggtcgaagccgccgatcccgtcgatctggcccgacccggcaccgatggccgctccatcgccattgcgctatcggccaagcgggtgttcgacggcgccggggtgtggccgctgctggcggatgaagccggaccgatcctgcaaattcgggtcaccgacggcgcctcgccgttgttcctgcattacgaccacgacgccatcggcgacgagcccttcggctggatcgtcgaaaacaccaccatccgccgggccatccatcagcgcctgggccaattgcccggcgcccaggtgctggccccggcccgcgtcgccgccattgatcgcgatgccgacggtgtcaccgccaccttggccgatggccgcaccatccgcgctggcttggtggtgggcgccgatgggcgcggctcgaccatccgccgcttggccggtatcggcgtgcagcgcttcggctatggccagtcgggcatcgtcaccaccgtgacccatgaaaagccacatcagggcatcgcccatgaacgctttttaccgtccggccccttcgccatcctgcccatgaccggcaatcgctcctccatcgtctggaccgagcggttgcatctggccgatgccatcgtcgggcaaagcgatgaagactttttggcggaactcaacacccgcttcggcgatttccttggtccggtgaccctggccgggccgcgtttccattatccgctgaccctgcaactggccgaccgcgccatcgaccatcggctggtgctgatcggcgacgccgcccacggcatgcatccggtggccggacaaggcatgaacatgggcatccgcgacgtcgccgccctggccgaggtgatcatggatgcccgccgcctgggcctggatgtgggcggccccgacgtgctggcccgttatcagcgctggcgccgcttcgacaacatgctgatgctggggctgaccgacgtcatggtgcggctgttctccaacgacatcggcccgctgaaactggcccgcgacctgggactggcggcggtgcaagccatgccgggggccaagcgctttttcatgaagcacgccatgggcgtggtcggcgatctgccccgcatgatgcggggcgaacccttataa

SEQ ID NO: 7459 - protein, 413 aa, Magnetospirillum gryphiswaldense
MDMSMIASSPPSLQADVLIVGGGPVGGLTACALAQAGLAVALVEAADPVDLARPGTDGRSIAIALSAKRVFDGAGVWPLLADEAGPILQIRVTDGASPLFLHYDHDAIGDEPFGWIVENTTIRRAIHQRLGQLPGAQVLAPARVAAIDRDADGVTATLADGRTIRAGLVVGADGRGSTIRRLAGIGVQRFGYGQSGIVTTVTHEKPHQGIAHERFLPSGPFAILPMTGNRSSIVWTERLHLADAIVGQSDEDFLAELNTRFGDFLGPVTLAGPRFHYPLTLQLADRAIDHRLVLIGDAAHGMHPVAGQGMNMGIRDVAALAEVIMDARRLGLDVGGPDVLARYQRWRRFDNMLMLGLTDVMVRLFSNDIGPLKLARDLGLAAVQAMPGAKRFFMKHAMGVVGDLPRMMRGEPL

SEQ ID NO: 7460 - DNA, 1623 bp, Vitis vinifera
  CDS (1)..(1623)
atgcgattcttggaaagaactcggaaaaaaaaaatgatgtttactgaatatttgtatcttgattgtggttcagtgaagaaacagaatattcatcaaatattggatgctcaaaacgcttttactggtgctgatatgaataatagagggaagggaagcttgaagtatctcttgcagcagagagagattgttgctcgttttgtcaaaggtgatcaatccacatctcagaaaaaggcaaagggaagggcggttgctgcaaaaattcctgcagaggtctgtggactgaaggttccgcgaaggactttctgtaataatattgctgcaagagagcatgaggagaatcagggtttgccaaacaatgttgtccattatgatattgccattgttggaggtggcatggttggcatggctcttgcctgttccttggcaagcatgccattgacaaaacagttgaatgttgccatcattgatagcaatcccgctttggagggcaaaacctgcatcaagaaagaagacccccctgatccaagggtcagtacagtcactcctgcaactatttctctttttaaagatgttggtgcttggcagtacgttcaacagcatcgacatgcatactttgataaaatgcaggtttgggattatactggattaggatacacaagatacaacgcgagagatgtagataaagaagtattagggtgtgtagtggagaataaggtgcttcatagttctttattgtcatgcatacagaacacagatctcaagaagagaatctatccttccagattaaattcaatgactctgcatcagaaccacttgcccacaatgatggacagcacttcatcatcattgcatgcttctttagctaagctagaactgagtgatggcaacagcctatacgcaaagttggtggtaggagctgatggggccaaatcacgtgttagggagttaacaggattcaaaacaactggatggtactactcacagaatgctgtaatctgtacagtagaacataaaacagaaaaccaatgtgcatggcaacggtttctaccttctggtccaattgcactcttgccggtgggtgataagtttagcaatattgtttggaccatgaacccaaaagaatcatcagcctgtagagaaatgaatgagaatgattttgtgaaggccttaaaccatgctttgaattatggatatgatgtggttaaattggtatctggaagaatggtgtttccattgtctttaaggcatgctaataattatgcatcaaagcgtgttgttctaattggtgatgcagcacacacagtacatcctttggctggccaaggagttaacttgggctttggagatgcatttgctctttcaagaataatttctgagggtattgcagtaggcactgacattggggaggtgcatctgttaaaaaaatttgaagcagagagaaaacgggaaaatattatgatgatggctatcctggatggctttcaaaaggcatactctgttgattttggacctctaaatgtattaagagctgctgcattccatggggcacagtatatttcaccattaaagaggagcatcatctcatatgcctcgggtgagcagagattgccactgttctcttga

SEQ ID NO: 7461 - protein, 540 aa, Vitis vinifera
MRFLERTRKKKMMFTEYLYLDCGSVKKQNIHQILDAQNAFTGADMNNRGKGSLKYLLQQREIVARFVKGDQSTSQKKAKGRAVAAKIPAEVCGLKVPRRTFCNNIAAREHEENQGLPNNVVHYDIAIVGGGMVGMALACSLASMPLTKQLNVAIIDSNPALEGKTCIKKEDPPDPRVSTVTPATISLFKDVGAWQYVQQHRHAYFDKMQVWDYTGLGYTRYNARDVDKEVLGCVVENKVLHSSLLSCIQNTDLKKRIYPSRLNSMTLHQNHLPTMMDSTSSSLHASLAKLELSDGNSLYAKLVVGADGAKSRVRELTGFKTTGWYYSQNAVICTVEHKTENQCAWQRFLPSGPIALLPVGDKFSNIVWTMNPKESSACREMNENDFVKALNHALNYGYDVVKLVSGRMVFPLSLRHANNYASKRVVLIGDAAHTVHPLAGQGVNLGFGDAFALSRIISEGIAVGTDIGEVHLLKKFEAERKRENIMMMAILDGFQKAYSVDFGPLNVLRAAAFHGAQYISPLKRSIISYASGEQRLPLFS

SEQ ID NO: 7462 - DNA, 1206 bp, Microcystis aeruginosa PCC 7806
  CDS (1)..(1206): transl_table=11
atgttaggacgggacaactacgatttaatcattgtcgggggcggtatagtcggaaccaccctagcggtggccttaaaaaatacaggattaaatatcgctatgatcgaggaacgtcccctagaggtggccgcctcccgtcgtcaagcttatgccctctcgctgatgtcgagccggatttttacaggcttgggtatctgggataaaatctcgcccagtatcggtaaatttcgtcatattcgcctttctgatgccgattttccgatttttgtcccctttgtggtcgatgagctaaaaaccgattatttgggctatgtgggcgaacatcaagtgattttaaccgccctgcacaatgccagccaagattgcgatcgcattgagtggttgtcccctgctaaagtgttaaaagtggagtacggagcagaaacagccactgtcaccctggaagaagctggtcaaacccgaaaaattaccgcaaaattagttatcggggctgatggagccaaatccgctatccggcaaggggcgcaaattaaaaccaaaggttggaaatattggcaatcctgtgtcgcttttaccattaaacatcaactcgatcgcaacgataccgcctttgaaagattttggcccaccggtccgatgggcattttaccgctccagggtaatcgctgtcagatcgtttggacaaatccccatcaagaagcgaaaaaactccaagaaatgcccgaagcggaatttatcgacaaattagaagcatatacggggggattactgggaaaactcgaattagttagcccccgcgctctctttcccgtacagttaatgcagagtgatacttatgttaaaccccgactggctttaattggtgatgccgcccactgttgtcatcccgtcggtggtcaaggtttaaatttaggcattcgcgacgcagccgctttagcgcaggtattaaaggaagcagcggaaaagcaaggggatatcggagcgctttctaccctaaaatcctacgaaaaatggcgtatatcggagaatttagcgattttaggcttcacagattttctagatcgcctgttctccaataactggccgcctatcgttgtcatccgtcgtctcggattggcaatgatgctcggttttcccccgttgaaattgtttgccctgcaattaatgacgggattaaaaggacgtattccccaattagctagatag

SEQ ID NO: 7463 - protein, 401 aa, Microcystis aeruginosa PCC 7806
MLGRDNYDLIIVGGGIVGTTLAVALKNTGLNIAMIEERPLEVAASRRQAYALSLMSSRIFTGLGIWDKISPSIGKFRHIRLSDADFPIFVPFVVDELKTDYLGYVGEHQVILTALHNASQDCDRIEWLSPAKVLKVEYGAETATVTLEEAGQTRKITAKLVIGADGAKSAIRQGAQIKTKGWKYWQSCVAFTIKHQLDRNDTAFERFWPTGPMGILPLQGNRCQIVWTNPHQEAKKLQEMPEAEFIDKLEAYTGGLLGKLELVSPRALFPVQLMQSDTYVKPRLALIGDAAHCCHPVGGQGLNLGIRDAAALAQVLKEAAEKQGDIGALSTLKSYEKWRISENLAILGFTDFLDRLFSNNWPPIVVIRRLGLAMMLGFPPLKLFALQLMTGLKGRIPQLAR

SEQ ID NO: 7464 - DNA, 1488 bp, Ostreococcus tauri
  CDS (1)..(1488)
atgctctcgtccatctcccgccgcttcgcctcgacggcgacgtccggggagatccgcgacgtggtcatcgtcggtggtggcgtcgcgggagcggcgctggcgtgcgcgctgcgcaggaacgaggcgacgagcgaccttcaggtgatgctcgtcgacgcgaatgattcgataaaacgacctctgaaggacgccaagcccgacgcgcggtgcgtcgcgctcacgccgcgatcgagaagcgtgctcgatgcgtgcggaccgcgcgtgtgggcgcggatcacggagaatggacgcgtgcgggcgtttgatagcatgcaggcgtgggacggcgtcggcggcggacacgtgagttacgccgcgagcgagctcggggcggaagctctggggcacgtcgtggagaattcattaattttggaggcgttggagcgggagatggagacgctcggggtggagcgcgtcgggaaggcgagcgcgtcggagacgcgcgcgccgagggagagcgaagcgggcgcgttggccgaagcgaagatttcagtcgatgaggacgggaaaacgcgggagttcgacgtgcgagcgaggttaatcgtcgccgcggacggaccgaagagcgcggtgcggaaaagcgcggggattaagattgcggggtgggggtacgggcagcgagcggtggtcgggacggttcgcacggatagagcgcactcaacggcgtggcagaggttcttgcccacggggccgattgcgttgttacccatcggtgatggcacgtactccaacgtcgtctggacgacgacgccgagcgaggcgaagcgattagccgaggacgtgagcgacgaagagttcgcgcaagaggtgcacgatgcgcttcaaggtctgggggcgtataaatcaccgtttcaggagaacttcgatcgattcgcgacgttgcgtttctttgaggacgcggtgaatcaggcgtacaaaccactcgtgcgcgtcactcgagagacggtgagccgggcggtcggcgtccccgtcatcgagtccgccgaggaggatacgtgcgccgaattcgccccgagattccggtacccgccctttgtctcacccgcgggtactgacaccaagcgtggctcgttcccgctatcgacgcatcacgcgctgtcgctgaccaagccgcgattggcgctcattggagacgccgcgcacgtcgtccacccactcggcggacaaggattgaacctcggtctgagagacgccgagctcttggtgaacgccatcgcgcgcgcccgcgagcttggtcaggacattggaagcgccagcgcgctggcgccgtacgccagagcgagcgtcgccgcgaacgtgcccatgatggccgctctcgacggtttacaaaagctctttagcgccgagacgtacccggtgacgttcgctcgatccctcggtctcgccgccgtcaacgccaccgctccagtgcgtcgtaaaatagcctggtacgccatgggtggcgcgtga

SEQ ID NO: 7465 - protein, 495 aa, Ostreococcus tauri
MLSSISRRFASTATSGEIRDVVIVGGGVAGAALACALRRNEATSDLQVMLVDANDSIKRPLKDAKPDARCVALTPRSRSVLDACGPRVWARITENGRVRAFDSMQAWDGVGGGHVSYAASELGAEALGHVVENSLILEALEREMETLGVERVGKASASETRAPRESEAGALAEAKISVDEDGKTREFDVRARLIVAADGPKSAVRKSAGIKIAGWGYGQRAVVGTVRTDRAHSTAWQRFLPTGPIALLPIGDGTYSNVVWTTTPSEAKRLAEDVSDEEFAQEVHDALQGLGAYKSPFQENFDRFATLRFFEDAVNQAYKPLVRVTRETVSRAVGVPVIESAEEDTCAEFAPRFRYPPFVSPAGTDTKRGSFPLSTHHALSLTKPRLALIGDAAHVVHPLGGQGLNLGLRDAELLVNAIARARELGQDIGSASALAPYARASVAANVPMMAALDGLQKLFSAETYPVTFARSLGLAAVNATAPVRRKIAWYAMGGA

SEQ ID NO: 7466 - DNA, 1518 bp, Arabidopsis thaliana
  CDS (1)..(1518)
atgaacagggtgctcgcaaggaatcttaggacaagtgtctgtggaacaaggattttgcagaggacttgttcgactgttgtgacacatgatgtttctacttcttgttccaatgagagcaatgcattaaataattccactgacgatggtccacaacatgacattgctattgttggtggtggaatggttggaatcgctttagctgcttcattggccagcaagccattgacaaagcacttgaatgtcgctattattgacaataatcctcttttggggagaagaaatatcatagagaaagggcatcaacctgatcccagagtcagtacagtcacacctgcaacaatatccttcctcaaagatattggtgcctggaaatacattgagcaacagcgacatgcgtattttgataagatgcaggtatgggactatacaggccttggatatacaagatacaatgctaatgatgtacatcaagatgttttggggtgtgtagtggagaataaagttcttcagagttctcagctatcttgtgtacaggaatcagatctccagaagactgtttatcccgcgaggttaaatgcgatggatatgctacctagctcttcgttgacaggtcttggtgaagtaccatccacaacaggcttgttcatgcgaggacgccttgctaagctggagctaagcgatggaaatcgcgtctacgcaaaactggtggtaggcgctgatgggtctaagtcgcgagtaagggagttggctgggatcaaaacgactggatggaactactcacagaacgctataatttgtactgttgaggatacagccgaaaactacacagcatggcaacggtttttacccaatggcccaatcgcacttcttcccattggtgacaagtttagcaacatagtatggaccatggacccaaaagaggcatcagatcgaaaattgatgaacgaggatgacttcatcaaagctgtaaatgatgctctggattctggatatggtcctaatccagagactacaagttcacgggatagtctctcttggcttacaggagatgcgaccatatctgccaaagagaggtttgaaactcctcccaaggttgtgaagctttcttcagagagaatgatgttccctttgtctttaaggcacgcaaaagactatgtgtcaaaacgtgtggctcttgttggtgactcagctcatacagttcacccgttggctggtcaaggagtaaatctaggatttgcagatgcgtgtgctctctccaaagctatagcagagggcattgctcttggtactgatataggcgaggcgaatctgctcaaacgttatgaagcagagagaaaacctgcaaatatagcaatgatggcggttttagacggaatccagaagatgtactcgttggatttcggaccgctgaatgctctaagagcagctgcattccacggggctcactacatttcgccgcttaaaaagcgtatcatatcttatgcttcaggagagcaatctttgccgctattttcttga

SEQ ID NO: 7467 - protein, 505 aa, Arabidopsis thaliana
MNRVLARNLRTSVCGTRILQRTCSTVVTHDVSTSCSNESNALNNSTDDGPQHDIAIVGGGMVGIALAASLASKPLTKHLNVAIIDNNPLLGRRNIIEKGHQPDPRVSTVTPATISFLKDIGAWKYIEQQRHAYFDKMQVWDYTGLGYTRYNANDVHQDVLGCVVENKVLQSSQLSCVQESDLQKTVYPARLNAMDMLPSSSLTGLGEVPSTTGLFMRGRLAKLELSDGNRVYAKLVVGADGSKSRVRELAGIKTTGWNYSQNAIICTVEDTAENYTAWQRFLPNGPIALLPIGDKFSNIVWTMDPKEASDRKLMNEDDFIKAVNDALDSGYGPNPETTSSRDSLSWLTGDATISAKERFETPPKVVKLSSERMMFPLSLRHAKDYVSKRVALVGDSAHTVHPLAGQGVNLGFADACALSKAIAEGIALGTDIGEANLLKRYEAERKPANIAMMAVLDGIQKMYSLDFGPLNALRAAAFHGAHYISPLKKRIISYASGEQSLPLFS

SEQ ID NO: 7468 - DNA, 1167 bp, uncultured marine bacterium 578
  CDS (1)..(1167): transl_table=11
ttgaaagtgttcgatgtaattgtcattggtggtggcatgatcggccttgcttttgctttagagttatcacagaaaaaaaactgctcgatcgccattattgagccaaatacatgtaaccctgcaatcaatgacacgtttcattcacgagtaagtgctattacaccatcttcccatgagtacctagtctctcttaatatttggaataacattaaaagaaaaaaagcatttgtggctacaaaggtatgggatcaaaattcgcatggacatctcaattttcacgctgaggatgagggtatggatcaacttggcttcattgtcgaaaatgatttaatacagtctgcactatttgaagcaattgactccagcaagataacgattattaatgccaagctagatagtttattaaaaactgatattggctatatgttaactctagatgacgagagtaatttgtcatgcaatctagttgtcggggctgatggtcctcaatcaaaagtcagaaacttagtggctattgaggttactgagcgtgactataatcaaaaagctattattgctaatatagttagtgaaaagtcacttgaaaatactacttggcagcgctttttatcagacagtattattgctttattgccactctctgaaaataaagcgtcaattgtatggtcttgcaaaagtaatcttgcagacgagttgatggagttagatatagatgattttaatcaatctttgtctgaagtcgttgagtatcgttttggtaagcttatactggaaagcaaaagaaaagtattcccactagtcgaaagaagtgcaaaggactatactctccctagcctcgctctagttggagatgctgctcacaacatccacccactagcaggtcagggagctaatctaggtttttcagatgcaaaggaactcaatagtcaacttttagaaaatgatgataaacccttgggcgaatatttagtcttaaggaagtatgcgagagcccgtcgattagataatgagttaatggctaaaactatgacaggtttagactggatatataaggaaaataatgagccacttcgatggcttagaggttttggtatgaatcttattgacgattccccaatgattaagtctttttttcaaaaacaggctctcggtaagtctattaaatga

SEQ ID NO: 7469 - protein, 388 aa, uncultured marine bacterium 578
MKVFDVIVIGGGMIGLAFALELSQKKNCSIAIIEPNTCNPAINDTFHSRVSAITPSSHEYLVSLNIWNNIKRKKAFVATKVWDQNSHGHLNFHAEDEGMDQLGFIVENDLIQSALFEAIDSSKITIINAKLDSLLKTDIGYMLTLDDESNLSCNLVVGADGPQSKVRNLVAIEVTERDYNQKAIIANIVSEKSLENTTWQRFLSDSIIALLPLSENKASIVWSCKSNLADELMELDIDDFNQSLSEVVEYRFGKLILESKRKVFPLVERSAKDYTLPSLALVGDAAHNIHPLAGQGANLGFSDAKELNSQLLENDDKPLGEYLVLRKYARARRLDNELMAKTMTGLDWIYKENNEPLRWLRGFGMNLIDDSPMIKSFFQKQALGKSIK

SEQ ID NO: 7470 - DNA, 1197 bp, Escherichia coli O6
  CDS (1)..(1197): transl_table=11
ttgctaacaggattattgaccatgacaaatcaaccaacggaaattgccattgtcggcggaggaatggtcggcggcgcactggcgctgggactggcacagcacgggtttacggtaacggttattgaacatgcccagcctgcgccgtttgttgcggacagccagccggacgtgcggatctcggcgatcagcgcggcttcggtatcattgcttaaaggggtaggggcctgggatgcagtacaggctatgcgttgccatccttaccgcagactggaaacgtgggagtgggaaacggcgcatgtcgtgtttgacgccgctgaacttaagctaccgttgcttggctacatggtggaaaacactgtcctgcaacaggcgttgtggcaggcgctggaagcgcatccgaaagtaacgttacgtgtgccaggctcgctgattgcactgcatcgccataatgatcttcaggagctggaactgaagggcggtgaaacgatcctcgcgaagctggtgattggtgccgacggcgcaaattcgcaggtgcgacagatggcgggaattggcgttcatgcctggcagtatgcgcagtcgtgtatgttaattagcgtacagtgtgagaacgatcccggcgacagcacctggcagcaatttaccccggacggaccgcgtgcgtttctgccgttgtttgataactgggcatcgctggtgtggtatgactctccggcgcgcattcgccagttgcagaatatgaatatggcgcagctacaggcggaaatcgtgaagcatttcccgtcgcgtcttgggtatgtaataccgcttgccgctggcgcgtttccgctgatacgtcgccatgcgttgcagtatgtgcagccggggcttgcgctggtgggcgatgccgcgcataccatccatccgctggcggggcagggggtgaatcttggttatcgtgatgtcgatgccctgattgacgttctggtgaacgcccgcagctacggcgaagcgtgggccagttatcctgtgctcaagcgttaccagatgcggcgtatggcggataacttcatgatgcaaagtggtatggatctgttttatgccggattcagcaataatctgccaccgctgcgttttgtgcgtaatcttggtttgatggcggcggagcgtgctggcgtgttgaaacgtcaggcgctgaaatatgcgttagggttgtag

SEQ ID NO: 7471 - protein, 398 aa, Escherichia coli O6
MLTGLLTMTNQPTEIAIVGGGMVGGALALGLAQHGFTVTVIEHAQPAPFVADSQPDVRISAISAASVSLLKGVGAWDAVQAMRCHPYRRLETWEWETAHVVFDAAELKLPLLGYMVENTVLQQALWQALEAHPKVTLRVPGSLIALHRHNDLQELELKGGETILAKLVIGADGANSQVRQMAGIGVHAWQYAQSCMLISVQCENDPGDSTWQQFTPDGPRAFLPLFDNWASLVWYDSPARIRQLQNMNMAQLQAEIVKHFPSRLGYVIPLAAGAFPLIRRHALQYVQPGLALVGDAAHTIHPLAGQGVNLGYRDVDALIDVLVNARSYGEAWASYPVLKRYQMRRMADNFMMQSGMDLFYAGFSNNLPPLRFVRNLGLMAAERAGVLKRQALKYALGL

SEQ ID NO: 7472 - DNA, 1434 bp, Drosophila melanogaster
  CDS (1)..(1434)
atgttgggtgttctacgtatccaaggagcgttggcttcggcggggcaggcgcgtcttctgtccgtccgcctgctggccagcaaatccaccactgacatgaccacaaaccgcggtgaatccacacaatcgacgtccaccgaacactttgatataatcatcggaggcggcggactggtgggcaccacattggccgcagctctggccaagaactcgacgttggcggacaagaaggtactgctgctggaaggtgcgcccgagttccggggatttaatcccactgggccataccagaatcgcgtatccgccatcaatcacaactccatcgagctgttcaagtccattgatgcgtggaagcacatcgagtcggcgcgctacaagcccgtcaagcagatgcaggtgtgggagtccaacacggacgcactgatccagttccagcacgataactttgccagcgacgtggcctgcatcattgagaacgatttgatcctggatgcggtctatgcgctggccaaggaatcacccaatgtggagatcctcaacaaggccagaatccagtgcgttcgcctgcccagggactccaactccaatcactccgagctgcagctagaggatggacgcaacttttcctgcgatttgctgatcggagcggatggcgccaattccgtggtcagaaaggagatgaacgtggatgtattttccctgaactacgaccgcatgggcctggtggctacgctggaactcggcgaagatgcctgtgataattccgtggcgtggcagaggtttctgcccaatggaccagtggcactgctaccactaacggacaggctgagctccctggtctggagcaccaccaacgagcaagcgaaaatgctgcaagccctaccacccacagaattcgtagacgccctcaacgaagccttctgccggcagtatccgcgcgttgagctcgcagacaaggctgtccaggcgctgaactccttgtttggacacaacggcagccagcaccaggtgcaatatccgccacgggtgtgcggcgtgctggacaagtcgcgtgccacgtttccattgggtttcctgcacgcctcgtcgtacgtgtgcaatggagcagctctggtcggtgatgccgcccatcgagtgcatccgctcgccggccagggcgtcaatctgggcttcagcgatgtgcggtatctggtggaatcgctggccgccggtgcatacgccggtttcaagctcggcgacaagcagcatctcatcaaatacgagcgcaagtgtctggcgaagaacgtgcccattatgctgggcgtgcatggactgcacacgctctacgccacgcagttcagtccggtggtcttgctgcgcagcttgggtctgcagctgacccagaacttgccgcccgtcaagaatctgttcatgcgcggagcgatgggtcagtag

SEQ ID NO: 7473 - protein, 477 aa, Drosophila melanogaster
MLGVLRIQGALASAGQARLLSVRLLASKSTTDMTTNRGESTQSTSTEHFDIIIGGGGLVGTTLAAALAKNSTLADKKVLLLEGAPEFRGFNPTGPYQNRVSAINHNSIELFKSIDAWKHIESARYKPVKQMQVWESNTDALIQFQHDNFASDVACIIENDLILDAVYALAKESPNVEILNKARIQCVRLPRDSNSNHSELQLEDGRNFSCDLLIGADGANSVVRKEMNVDVFSLNYDRMGLVATLELGEDACDNSVAWQRFLPNGPVALLPLTDRLSSLVWSTTNEQAKMLQALPPTEFVDALNEAFCRQYPRVELADKAVQALNSLFGHNGSQHQVQYPPRVCGVLDKSRATFPLGFLHASSYVCNGAALVGDAAHRVHPLAGQGVNLGFSDVRYLVESLAAGAYAGFKLGDKQHLIKYERKCLAKNVPIMLGVHGLHTLYATQFSPVVLLRSLGLQLTQNLPPVKNLFMRGAMGQ

SEQ ID NO: 7474 - DNA, 1401 bp, Schizosaccharomyces pombe
  CDS (1)..(1401)
atgcctactatcagtccaactttaggaatatacacgaggaagtttgcaagccaaaaaatacttcaacgtcaattcgatgttgttatagtaggatccggtcctgtcggactggctttagctgctggactacagagtaatcccgtaactcaatcactcaaagttgggcttttggacattcaggatacgatgaaattaaaggattggaagtttgaaacgtactctaatcgttgtagctctttaacgaatcatacccgcatgttttttgacaaaattggtgcttgggattttgctcgcaaggatcgcatccaacctttccaacacattcttgcctctgatggtctaactaattcctccatacatcttgatcaaaaaccaggaagtgaacccatggctttcatgtcggaaaacgtcaatttgcaatacgcccttttgaattctatcatcgataaaatgaataacaatattaaaaaacctaatttagaatttttaatgccttgcactattactaagctttctaaaggagaaaatatctatagaacgcatattcatacaacaactcatggtgaattaacaacgaagctcttaattggtgcggatggaagaaattcaattgttcgcaaatacgcaaatatttccatgccagggtggaactatcttactcatgctgtggtcgggacacttaaaattgatccgttaaaaggacctgccgtagctttccagcgatttttacctaccggtcctttagcttaccttcctttacctgacaacaatgctaccttcgtatggagtacgcggccacatattgcatcaaaacttcttcgtcttccagaagaaacttttgttaagtttttgaatgcatctttccgcctggattatcccgatttaagctatttgtatcaaatggatttttctgagccttccaaagttaatgaacagttggattggaggttgcaagttaagagaaattctaatatgcaggtccctcctgttataaccgaaattgtttctggttctagggcggcatttccgttgagacttgcccatgttgatgaatatgtaaaagaaggaattgccctttgcggggacgctgctcataacactcatccattagctggacagggattaaatactggaattcaggatgttgaatctttaatatcagcactctcttttgctatcaagcacggtcaggatattggtagtgttttttcactccaaccgtatttccgtgaccgttacttcaaaaaccatgtttatctaggagtcgttgataagttccacaagctgtacgcaatggaaaatccggtggtcacttctgtacgaacccttggactttcattatttgatcgcagtgctagcttgaaaaacttcattctttctacggtagctaatggaatttag

SEQ ID NO: 7475 - protein, 466 aa, Schizosaccharomyces pombe
MPTISPTLGIYTRKFASQKILQRQFDVVIVGSGPVGLALAAGLQSNPVTQSLKVGLLDIQDTMKLKDWKFETYSNRCSSLTNHTRMFFDKIGAWDFARKDRIQPFQHILASDGLTNSSIHLDQKPGSEPMAFMSENVNLQYALLNSIIDKMNNNIKKPNLEFLMPCTITKLSKGENIYRTHIHTTTHGELTTKLLIGADGRNSIVRKYANISMPGWNYLTHAVVGTLKIDPLKGPAVAFQRFLPTGPLAYLPLPDNNATFVWSTRPHIASKLLRLPEETFVKFLNASFRLDYPDLSYLYQMDFSEPSKVNEQLDWRLQVKRNSNMQVPPVITEIVSGSRAAFPLRLAHVDEYVKEGIALCGDAAHNTHPLAGQGLNTGIQDVESLISALSFAIKHGQDIGSVFSLQPYFRDRYFKNHVYLGVVDKFHKLYAMENPVVTSVRTLGLSLFDRSASLKNFILSTVANGI

SEQ ID NO: 7476 - DNA, 1176 bp, Escherichia coli
  CDS (1)..(1176): transl_table=11
atgacaaatcaaccaacggaaattgccattgtcggcggaggaatggtcggcggcgcactggcgctggggctggcacagcacggatttgcggtaacggtgatcgagcacgcagaaccagcgccgtttgtcgctgatagccaaccggacgtgcggatctcggcgatcagcgcggcttcggtatcattgcttaaagggttaggggtctgggatgcagtacaggctatgcgttgccatccttaccgcagactggaaacgtgggagtgggaaacggcgcatgtggtgtttgacgccgctgaacttaagctaccgctgcttggctatatggtggaaaacactgtcctgcaacaggcgttgtggcaggcgctggaagcgcatccgaaagtaacgttacgtgtgccaggctcgctgattgcgctgcatcgccatgatgatcttcaggagctggagctgaaaggcggtgaagtgattcgcgcgaagctggtgattggtgccgacggcgcaaattcgcaggtgcggcagatggcgggaattggcgttcatgcatggcagtatgcgcagtcgtgcatgttgattagcgtccagtgcgagaacgatcccggcgacagcacctggcagcaatttactccggacggaccgcgtgcgtttctgccgttgtttgataactgggcatcgctggtgtggtatgactctccggcgcgtattcgccagttgcagaatatgaatatggcacagctccaggcggaaatcgcgaagcatttcccgtcgcgtctgggttacgttacaccgcttgccgctggtgcgtttccgctgacgcgtcgccatgcgttgcagtacgtgcagccagggcttgcgctggtgggcgatgccgcgcataccatccatccgctggcggggcagggagtgaatcttggttatcgtgatgtcgatgccctgattgatgttctggtcaacgcccgcagctacggcgaagcgtgggccagttatcctgtcctcaagcgttaccagatgcggcgcatggcggataacttcattatgcaaagcggtatggatctgttttatgccggattcagcaataatctgccaccactgcgttttatgcgtaatctcgggttaatggcggcggagcgtgctggcgtgttgaaacgtcaggcgctgaaatatgcgttagggttgtag

SEQ ID NO: 7477 - protein, 391 aa, Escherichia coli
MTNQPTEIAIVGGGMVGGALALGLAQHGFAVTVIEHAEPAPFVADSQPDVRISAISAASVSLLKGLGVWDAVQAMRCHPYRRLETWEWETAHVVFDAAELKLPLLGYMVENTVLQQALWQALEAHPKVTLRVPGSLIALHRHDDLQELELKGGEVIRAKLVIGADGANSQVRQMAGIGVHAWQYAQSCMLISVQCENDPGDSTWQQFTPDGPRAFLPLFDNWASLVWYDSPARIRQLQNMNMAQLQAEIAKHFPSRLGYVTPLAAGAFPLTRRHALQYVQPGLALVGDAAHTIHPLAGQGVNLGYRDVDALIDVLVNARSYGEAWASYPVLKRYQMRRMADNFIMQSGMDLFYAGFSNNLPPLRFMRNLGLMAAERAGVLKRQALKYALGL

SEQ ID NO: 7478 - DNA, 1551 bp, Oryza sativa
  CDS (1)..(1551)
atgctctccagaggaagatgtttcccggcggcgagtcggatccggccgctggtcagggccttctgcgacgtgccgccttcgctccaggatgcggccgccggggtgcccagctcgcaggatcacacagagaaggttgatgatgtgaaagctagacccgacgagctcgacattgctatcgttggtggaggcatggtgggattggctgttgcttgtgcattgtccaatatgccattgactaaacatctgagggttggcatcattgatagcaatcctgcattgaagtcaagaaattatctgaagaaagatggtgtacctgattcaagggtcagtactattactcccgcgaccatatccttcttcagagatattggtgcatgggatcatgttcaacagcaaagacacgctttctttggtaaaatgcaggtatgggattacactggactgggttacacaaggtatagtgcaagggatgtgggaaaagaatatctcggatgcgtggtggagaacaaggtgctttgcaactcactgttgttacgattacaggaggaaaatggagacattgaaaagatgatctaccctactagactgatttctcttgctttgccatcaaagagcagacaagcaccaacaagggaagcaatatccagtggttaccctccagaagaattaaatcgcagcaatttagttaaacttgagctaagtgatggacaaactttatattcaaaactagtggtgggagctgacggttccaagtccaatgtaaggcaaacagcaggcataaaaacaacagggtggaattatcctcaaagtgcaattatttgtacagtggagcatattaccgaaaacgattgtgcatggcagaggtttctcccttctgggccaattgctctacttccaataggtgacaactacagcaatattgtgtggacaatgagcccagaggagtcattgcgccataagtcaatgagtcctgaagattttgtgaagtctgtgaacaatgcattggattttggttacggtccacatccacactctggtagtcttgactattacatggaaaagttattttctgacattggaagtactgctgcatctacaaaggaatgctttgaagtacctccaaaagcaatcggggtagtctgtgagagaatggcatttccattgtcgctgaagcattcacatgattatatttcaaaaaggttagcactagtcggtgatgcagctcatacagtccatcccttagctggccaaggtgtcaacttaggttttggagatgcagctgctttagcaaaagttatcgctgaaggagtttctgtgggtgctgattttggggatatttccttgctcaaaaggtatgagaataatcgcaaagcagccaatgttgcaatggcagcgctgctagatggtttccagaagatgtactctgttgattttggacccctcaatgtgcttagggctgcagcgtttcacggtgcccagtacatatcaccactgaagaagaacataatctcgtatgcaatgggcgacgcgaaatggccgctgttttcatag

SEQ ID NO: 7479 - protein, 516 aa, Oryza sativa
MLSRGRCFPAASRIRPLVRAFCDVPPSLQDAAAGVPSSQDHTEKVDDVKARPDELDIAIVGGGMVGLAVACALSNMPLTKHLRVGIIDSNPALKSRNYLKKDGVPDSRVSTITPATISFFRDIGAWDHVQQQRHAFFGKMQVWDYTGLGYTRYSARDVGKEYLGCVVENKVLCNSLLLRLQEENGDIEKMIYPTRLISLALPSKSRQAPTREAISSGYPPEELNRSNLVKLELSDGQTLYSKLVVGADGSKSNVRQTAGIKTTGWNYPQSAIICTVEHITENDCAWQRFLPSGPIALLPIGDNYSNIVWTMSPEESLRHKSMSPEDFVKSVNNALDFGYGPHPHSGSLDYYMEKLFSDIGSTAASTKECFEVPPKAIGVVCERMAFPLSLKHSHDYISKRLALVGDAAHTVHPLAGQGVNLGFGDAAALAKVIAEGVSVGADFGDISLLKRYENNRKAANVAMAALLDGFQKMYSVDFGPLNVLRAAAFHGAQYISPLKKNIISYAMGDAKWPLFS

SEQ ID NO: 7480 - DNA, 1521 bp, Brassica napus
  CDS (1)..(1521)
atgaacagggtgcttgcaaggaaacttaggactaatgtctgtggatcaaaacatatctttcagagggcttgttctactcatgtgacacgcaaagtctcttctactgctggttccaatgagaccaatgcaaattccactggcgatagtcctcaacatgacattgctattgtcggtggtggaatggttggaattgctttagctgcctcgttagctagcaagccattgacaaagcacttgaatgttgctattattgacaacaatcctcttttggggagaaaaaacatcattgagaaagggcacctacctgatcctagagtcagtaccgtcacacctgcaacaatatccttcctcaaagatattggtgcctggaaatacattgaagaacagcgacatgcctattttgacaaaatgcaggtctgggactacacgggccttggatatacaagatacaatgctaaagatgtcgatcaagatatcttggggtgcgttgtggagaataaagttcttcagagttctcagctatcttgtgttcaggaatcagatcttcagaagactatttatccagcgaggttaaactcaatggatatgttacctagttcttctttgactggtcttggtgaagtaccatccacagcagatttatttatgcgagggcgccttgcgaaactggagctaagcgatggaaacaacgtctatgcaaaactggtggtaggtgccgacgggtccaagtctcgagtgagggagttggcaggaatcaaaacaacaggatggaactactctcagaacgctataatctgtacagttgagcacactgtcgaaaacttcactgcatggcaacggtttttacccaatggacccatcgcacttcttcctgttggcgacaagtttagcaacattgtatggactatggatcctacagaggcctcagatcgcaaatccatgagcgaggatgacttcatcaaagctgtaaacgacgctctggattatggatacggcccacatccagagacaacaagttcaggaggtagtagtctctcttggcttacaggagatgtgaacatatctgccaaggagaggtttgaaactccaccaaaggttgtgaagctttcatcagaaagaatgatgtttcctttgtctttaaggcatgcaaaagactatgtttcaaaccgtgtggctctcgtgggtgactcagctcatactgttcaccccttggccggccaaggagttaatctaggatttgcagatgcgagtgccctctccagagctatagcagaaggcatcgctcttggtaccgatataggcgaggcgaatctgctgaaacgatatgaagcagagagaaagcctgcaaatatagcaatgatggcggtattagatgggatccagaagatgtatgcagtcaatttcggacctttgaatgcattcagagcggctgcatttcacggagctcactacatttcccctcttaaaaagcgtatcatatcatatgcttccggagagcagtctctgccactcttttcttga

SEQ ID NO: 7481 - protein, 506 aa, Brassica napus
MNRVLARKLRTNVCGSKHIFQRACSTHVTRKVSSTAGSNETNANSTGDSPQHDIAIVGGGMVGIALAASLASKPLTKHLNVAIIDNNPLLGRKNIIEKGHLPDPRVSTVTPATISFLKDIGAWKYIEEQRHAYFDKMQVWDYTGLGYTRYNAKDVDQDILGCVVENKVLQSSQLSCVQESDLQKTIYPARLNSMDMLPSSSLTGLGEVPSTADLFMRGRLAKLELSDGNNVYAKLVVGADGSKSRVRELAGIKTTGWNYSQNAIICTVEHTVENFTAWQRFLPNGPIALLPVGDKFSNIVWTMDPTEASDRKSMSEDDFIKAVNDALDYGYGPHPETTSSGGSSLSWLTGDVNISAKERFETPPKVVKLSSERMMFPLSLRHAKDYVSNRVALVGDSAHTVHPLAGQGVNLGFADASALSRAIAEGIALGTDIGEANLLKRYEAERKPANIAMMAVLDGIQKMYAVNFGPLNAFRAAAFHGAHYISPLKKRIISYASGEQSLPLFS

SEQ ID NO: 7482 - DNA, 1560 bp, Triticum aestivum
  CDS (1)..(1560)
atgacgccgacgccggcgcgcgcctccgcggccgcggcccacgccctgctgcgcagaacgagatgcttcgccgcggcgaatcagatccggacggcctcgagggccttctccagcgcgccggcgggagcgtccgagccgcagggcccagagaaagtcgccggagatgacgagcttgatgttgctatcgtcggtggaggcatggtgggcctggctgttgcttgtgcactctccaatatgccattgaccaaacacctgcgagttgccgtcatcgatagcaatcctgcattgaagtcaacgaattatctgaagaaagatggtatacctgattcaagggtcagcactgttactcctgcaaccatttccttcttcagagatattggtgcatgggagcatattctacagcagagacacgctttctttggtaaaatgcaggtgtgggattacactggactgggatacacaaggtacaactcaagagatgtgtgcaaagaatatcttggatgtgtggtggagaacaaggtgctttgcaactcacttctgttacgcctacaggagcaaaaggaagacattaaaaagatggtctaccctacccgattggcgtctcttgctttcccatcaaagagcagaaatgtaggagtagcaggactgaagccaccatcaactgaggcggaggaactacgccgtagtaatttggttaaacttgacctaagtgatggacagactttatattcaaagttggtggtaggagctgatggttccaaatccaatgtaaggcagattgcgggcataaaaactactggttggagctatcctcagagtgcgattatctgtacagtagagcatactgcagcgaatgactgtgcatggcagaggtttctcccttctggtccgattgccctgcttccaataggcgacaacttcagcaatatagtgtggacaatgagcccagaggaggcatcacgccataagtcaatgagccctgaagattttgtgatgtcagtgaaccgtgcattggattttggttatggaccgcatcccaactctagtagtcttgaccattacgtggaaaggttattttctgactttggaggtactgcagcgtctacaaaagaatgctttgaagtaccaccaagggcaactgggctgatctcagagagaatggcatttccattgtcactgatgcactcccatgattatgtttcaaaaaggctagcattagttggtgatgctgctcatacagtgcaccccttggccggtcaaggtgtcaatttgggttttggagacgcagctgccttagcggaagttatttctgaaggagtttctgttggtgctgatattggggatctgtctttgctgaatcggtatgagaatgaccgcaaggctgccaatgttgcgatggcggcagttctagatggcttccagaagatgtactctgtcgatttcggacccctcaatgttctgagagccgctgcattccatggtgcccagtacatatcaccactgaagaagaacataatttcttacgcaatgggcgacaggaaatcgcctctgttttcataa

SEQ ID NO: 7483 - protein, 519 aa, Triticum aestivum
MTPTPARASAAAAHALLRRTRCFAAANQIRTASRAFSSAPAGASEPQGPEKVAGDDELDVAIVGGGMVGLAVACALSNMPLTKHLRVAVIDSNPALKSTNYLKKDGIPDSRVSTVTPATISFFRDIGAWEHILQQRHAFFGKMQVWDYTGLGYTRYNSRDVCKEYLGCVVENKVLCNSLLLRLQEQKEDIKKMVYPTRLASLAFPSKSRNVGVAGLKPPSTEAEELRRSNLVKLDLSDGQTLYSKLVVGADGSKSNVRQIAGIKTTGWSYPQSAIICTVEHTAANDCAWQRFLPSGPIALLPIGDNFSNIVWTMSPEEASRHKSMSPEDFVMSVNRALDFGYGPHPNSSSLDHYVERLFSDFGGTAASTKECFEVPPRATGLISERMAFPLSLMHSHDYVSKRLALVGDAAHTVHPLAGQGVNLGFGDAAALAEVISEGVSVGADIGDLSLLNRYENDRKAANVAMAAVLDGFQKMYSVDFGPLNVLRAAAFHGAQYISPLKKNIISYAMGDRKSPLFS

SEQ ID NO: 7484 - DNA, 27 bp, Artificial sequence
  primer
atgttcttttcaaaagttatgcttact

SEQ ID NO: 7485 - DNA, 25 bp, Artificial sequence
  primer
tcatttctcatttcctcctaatgtg

SEQ ID NO: 7486 - protein, 568 aa, Artificial sequence
  consensus sequence
  Variant (2)..(3): Xaa in position 2 to 3 is any amino acid
  Variant (5)..(5): Xaa in position 5 is any amino acid
  Variant (9)..(10): Xaa in position 9 to 10 is any amino acid
  Variant (12)..(14): Xaa in position 12 to 14 is any amino acid
  Variant (16)..(17): Xaa in position 16 to 17 is any amino acid
  Variant (19)..(40): Xaa in position 19 to 40 is any amino acid
  Variant (41)..(63): Xaa in position 41 to 63 is any or no amino acid
  Variant (65)..(66): Xaa in position 65 to 66 is any amino acid
  Variant (68)..(79): Xaa in position 68 to 79 is any amino acid
  Variant (80)..(80): Xaa in position 80 is any or no amino acid
  Variant (82)..(82): Xaa in position 82 is any amino acid
  Variant (83)..(84): Xaa in position 83 to 84 is any or no amino acid
  Variant (86)..(115): Xaa in position 86 to 115 is any amino acid
  Variant (116)..(140): Xaa in position 116 to 140 is any or no amino acid
  Variant (142)..(144): Xaa in position 142 to 144 is any amino acid
  Variant (146)..(152): Xaa in position 146 to 152 is any amino acid
  Variant (154)..(192): Xaa in position 154 to 192 is any amino acid
  Variant (193)..(223): Xaa in position 193 to 223 is any or no amino acid
  Variant (225)..(227): Xaa in position 225 to 227 is any amino acid
  Variant (231)..(231): Xaa in position 231 is any amino acid
  Variant (232)..(232): Xaa in position 232 is any or no amino acid
  Variant (234)..(235): Xaa in position 234 to 235 is any amino acid
  Variant (237)..(243): Xaa in position 237 to 243 is any amino acid
  Variant (244)..(248): Xaa in position 244 to 248 is any or no amino acid
  Variant (250)..(270): Xaa in position 250 to 270 is any amino acid
  Variant (271)..(278): Xaa in position 271 to 278 is any or no amino acid
  Variant (280)..(282): Xaa in position 280 to 282 is any amino acid
  Variant (283)..(284): Xaa in position 283 to 284 is any or no amino acid
  Variant (287)..(287): Xaa in position 287 is any amino acid
  Variant (289)..(289): Xaa in position 289 is any amino acid
  Variant (292)..(298): Xaa in position 292 to 298 is any amino acid
  Variant (299)..(316): Xaa in position 299 to 316 is any or no amino acid
  Variant (319)..(359): Xaa in position 319 to 359 is any amino acid
  Variant (360)..(429): Xaa in position 360 to 429 is any or no amino acid
  Variant (432)..(445): Xaa in position 432 to 445 is any amino acid
  Variant (447)..(447): Xaa in position 447 is any amino acid
  Variant (453)..(454): Xaa in position 453 to 454 is any amino acid
  Variant (457)..(457): Xaa in position 457 is any amino acid
  Variant (462)..(462): Xaa in position 462 is any amino acid
  Variant (466)..(467): Xaa in position 466 to 467 is any amino acid
  Variant (469)..(471): Xaa in position 469 to 471 is any amino acid
  Variant (473)..(485): Xaa in position 473 to 485 is any amino acid
  Variant (486)..(493): Xaa in position 486 to 493 is any or no amino acid
  Variant (495)..(496): Xaa in position 495 to 496 is any amino acid
  Variant (498)..(500): Xaa in position 498 to 500 is any amino acid
  Variant (502)..(510): Xaa in position 502 to 510 is any amino acid
  Variant (511)..(534): Xaa in position 511 to 534 is any or no amino acid
  Variant (536)..(537): Xaa in position 536 to 537 is any amino acid
  Variant (538)..(547): Xaa in position 538 to 547 is any or no amino acid
  Variant (549)..(552): Xaa in position 549 to 552 is any amino acid
  Variant (553)..(558): Xaa in position 553 to 558 is any or no amino acid
  Variant (560)..(565): Xaa in position 560 to 565 is any amino acid
  Variant (566)..(567): Xaa in position 566 to 567 is any or no amino acid
DXXIXGGGXXGXXXAXXLXXXXXXXXXXXXXXXXXXXXXXXXXXXXXXXXXXXXXXXXXXXXXRXXAXXXXXXXXXXXXXGXXXWXXXXXXXXXXXXXXXXXXXXXXXXXXXXXXXXXXXXXXXXXXXXXXXXXXXXXXXGXXXEXXXXXXXLXXXXXXXXXXXXXXXXXXXXXXXXXXXXXXXXXXXXXXXXXXXXXXXXXXXXXXXXXXXXXXXXXXXXXXLXXXADGXXSXXRXXXXXXXXXXXXYXXXXXXXXXXXXXXXXXXXXXXXXXXXXXFXXXXXGPXAXLPXXXXXXXXXXXXXXXXXXXXXXXXXVWXXXXXXXXXXXXXXXXXXXXXXXXXXXXXXXXXXXXXXXXXXXXXXXXXXXXXXXXXXXXXXXXXXXXXXXXXXXXXXXXXXXXXXXXXXXXXXXXXXXXXXXXXXXXXXXPLXXXXXXXXXXXXXXLXGDAAHXXHPXAGQGXNLGXXDXXXLXXXXXXXXXXXXXXXXXXXXXLXXYXXXRXXXXXXXXXXXXXXXXXXXXXXXXXXXXXXXXXRXXXXXXXXXXXXGXXXXXXXXXXKXXXXXXXXG

SEQ ID NO: 7487 - protein, 27 aa, Artificial sequence
  protein pattern
  Variant (2)..(2): Xaa in position 2 is any or no amino acid
  Variant (8)..(10): Xaa in position 8 to 10 is any amino acid
  Variant (12)..(12): Xaa in position 12 is Ile, Leu or Val
  Variant (13)..(13): Xaa in position 13 is Ala or Gly
  Variant (15)..(15): Xaa in position 15 is any amino acid
  Variant (17)..(17): Xaa in position 17 is Ala, Ile, Leu or Val
  Variant (19)..(19): Xaa in position 19 is any amino acid
  Variant (21)..(22): Xaa in position 21 to 22 is any amino acid
  Variant (24)..(26): Xaa in position 24 to 26 is any amino acid
  Variant (27)..(27): Xaa in position 27 is Ile or Leu
LXGDAAHXXXPXXGXGXNXGXXDXXXX

SEQ ID NO: 7488 - protein, 13 aa, Artificial sequence
  protein pattern
  Variant (2)..(2): Xaa in position 2 is Ile, Leu or Val
  Variant (3)..(3): Xaa in position 3 is Ile or Val
  Variant (4)..(4): Xaa in position 4 is Ala or Gly
  Variant (8)..(9): Xaa in position 8 to 9 is any amino acid
  Variant (11)..(12): Xaa in position 11 to 12 is any amino acid
LXXXADGXXSXXR

SEQ ID NO: 7489 - DNA, 597 bp, Saccharomyces cerevisiae
  CDS (1)..(597)
atgacaggttactttttaccaccacaaacaagttcttacacgttcaggtttgctaaggtcgatgactctgcaattctatcagtcggtggtaacgttgcgttcgaatgttgtgcacaagaacaacctccaattacatcgacggattttacaatcaatggtattaagccatggcaaggaagtttgcctgataacatcggagggactgtctacatgtatgcaggctactattatccgctgaaggttgtttactccaatgccgtttcctggggcacgcttccaattagcgtggaattgcctgatggtactactgttagtgatgactttgaagggtacgtttactcttttgacgatgatttaagtcagtcaaattgtactatccctgatccttcaaaacatactactagcatcgtcacaactactaccgaactgtggactggtacttttacttctacatctactgaaatgaccaccgtcaccggtactaatggtcaaccaactgacgaaaccgttattgttgccaaagctccaaccactgccacctcatccagtttgtcatcatcttcttcagaacaaatcaccagctctatcacgtcttag

SEQ ID NO: 7490 - protein, 198 aa, Saccharomyces cerevisiae
MTGYFLPPQTSSYTFRFAKVDDSAILSVGGNVAFECCAQEQPPITSTDFTINGIKPWQGSLPDNIGGTVYMYAGYYYPLKVVYSNAVSWGTLPISVELPDGTTVSDDFEGYVYSFDDDLSQSNCTIPDPSKHTTSIVTTTTELWTGTFTSTSTEMTTVTGTNGQPTDETVIVAKAPTTATSSSLSSSSSEQITSSITS

SEQ ID NO: 7491 - DNA, 1287 bp, Saccharomyces cerevisiae
  CDS (1)..(1287)
atgacaatgcctcatcgctatatgtttttggcagtctttacacttctggcactaactagtgtggcctcaggagccacagaggcgtgcttaccagcaggccagaggaaaagtgggatgaatataaatttttaccagtattcattgaaagattcctccacatattcgaatgcagcatatatggcttatggatatgcctcaaaaaccaaactaggttctgtcggaggacaaactgatatctcgattgattataatattccctgtgttagttcatcaggcacatttccttgtcctcaagaagattcctatggaaactggggatgcaaaggaatgggtgcttgttctaatagtcaaggaattgcatactggagtactgatttatttggtttctatactaccccaacaaacgtaaccctagaaatgacaggttattttttaccaccacagacgggttcttacacattcaagtttgctacagttgacgactctgcaattctatcagtaggtggtgcaaccgcgttcaactgttgtgctcaacagcaaccgccgatcacatcaacgaactttaccattgacggtatcaagccatggggtggaagtttgccacctaatatcgaaggaaccgtctatatgtacgctggctactattatccaatgaaggttgtttactcgaacgctgtttcttggggtacacttccaattagtgtgacacttccagatggtaccactgtaagtgatgacttcgaagggtacgtctattcctttgacgatgacctaagtcaatctaactgtactgtccctgacccttcaaattatgctgtcagtaccactacaactacaacggaaccatggaccggtactttcacttctacatctactgaaatgaccaccgtcaccggtaccaatggtttgccaactgatgagaccatcattgtcatcagaacaccaacaacagccactactgccatgactacaactcagccatggaacgacacttttacctctacatccactgaaatgaccaccgtcaccggtaccaacggtttgccaactgatgaaaccatcattgtcatcagaacaccaacaacagccactactgccataactacaactgagccatggaacagcacttttacctctacttctaccgaattgaccacagtcaccggtaccaatggtttgccaactgatgagaccatcattgtcatcagaacaccaacaacagccactactgccatgactacactcagccatggaacgacacttttacctctacatccactgaaatga

SEQ ID NO: 7492 - protein, 428 aa, Saccharomyces cerevisiae
MTMPHRYMFLAVFTLLALTSVASGATEACLPAGQRKSGMNINFYQYSLKDSSTYSNAAYMAYGYASKTKLGSVGGQTDISIDYNIPCVSSSGTFPCPQEDSYGNWGCKGMGACSNSQGIAYWSTDLFGFYTTPTNVTLEMTGYFLPPQTGSYTFKFATVDDSAILSVGGATAFNCCAQQQPPITSTNFTIDGIKPWGGSLPPNIEGTVYMYAGYYYPMKVVYSNAVSWGTLPISVTLPDGTTVSDDFEGYVYSFDDDLSQSNCTVPDPSNYAVSTTTTTTEPWTGTFTSTSTEMTTVTGTNGLPTDETIIVIRTPTTATTAMTTTQPWNDTFTSTSTEMTTVTGTNGLPTDETIIVIRTPTTATTAITTTEPWNSTFTSTSTELTTVTGTNGLPTDETIIVIRTPTTATTAMTTLSHGTTLLPLHPLK

SEQ ID NO: 7493 - DNA, 3399 bp, Saccharomyces cerevisiae
  CDS (1)..(3399)
atgacaatgcctcatcgctatatgtttttggcagtctttacacttctggcactaactagtgtggcctcaggagccacagaggcgtgcttaccagcaggccagaggaaaagtgggatgaatataaatttttaccagtattcattgaaagattcctccacatattcgaatgcagcatatatggcttatggatatgcctcaaaaaccaaactaggttctgtcggaggacaaactgatatctcgattgattataatattccctgtgttagttcatcaggcacatttccttgtcctcaagaagattcctatggaaactggggatgcaaaggaatgggtgcttgttctaatagtcaaggaattgcatactggagtactgatttatttggtttctatactaccccaacaaacgtaaccctagaaatgacaggttattttttaccaccacagacgggttcttacacattcaagtttgctacagttgacgactctgcaattctatcagtaggtggtgcaaccgcgttcaactgttgtgctcaacagcaaccgccgatcacatcaacgaactttaccattgacggtatcaagccatggggtggaagtttgccacctaatatcgaaggaaccgtctatatgtacgctggctactattatccaatgaaggttgtttactcgaacgctgtttcttggggtacacttccaattagtgtgacacttccagatggtaccactgtaagtgatgacttcgaagggtacgtctattcctttgacgatgacctaagtcaatctaactgtactgtccctgacccttcaaattatgctgtcagtaccactacaactacaacggaaccatggaccggtactttcacttctacatctactgaaatgaccaccgtcaccggtaccaatggtttgccaactgatgagaccatcattgtcatcagaacaccaacaacagccactactgccatgactacaactcagccatggaacgacacttttacctctacatccactgaaatgaccaccgtcaccggtaccaacggtttgccaactgatgaaaccatcattgtcatcagaacaccaacaacagccactactgccataactacaactgagccatggaacagcacttttacctctacttctaccgaattgaccacagtcaccggtaccaatggtttgccaactgatgagaccatcattgtcatcagaacaccaacaacagccactactgccatgactacaactcagccatggaacgacacttttacctctacatccactgaaatgaccaccgtcaccggtaccaacggtttgccaactgatgaaaccatcattgtcatcagaacaccaacaacagccactactgccatgactacaactcagccatggaacgacacttttacctctacatccactgaaatgaccaccgtcaccggtaccaacggtttgccaactgatgagaccatcattgtcatcagaacaccaacaacagccactactgccatgactacaactcagccatggaacgacacttttacctctacatccactgaaatgaccaccgtcaccggtaccaacggcgttccaactgacgaaaccgtcattgtcatcagaactccaactagtgaaggtctaatcagcaccaccactgaaccatggactggtactttcacctctacatccactgaaatgaccaccgtcaccggtactaacggtcaaccaactgacgaaaccgtgattgttatcagaactccaaccagtgaaggtttggttacaaccaccactgaaccatggactggtacttttacttctacatctactgaaatgaccaccattactggaaccaacggtcaaccaactgacgaaaccgtgattgttatcagaactccaaccagtgaaggtttggttacaaccaccactgaaccatggactggtacttttacttcgacttccactgaaatgtctactgtcactggaaccaatggcttgccaactgatgaaactgtcattgttgtcaaaactccaactactgccatctcatccagtttgtcatcatcatcttcaggacaaatcaccagctctatcacgtcttcgcgtccaattattaccccattctatcctagcaatggaacttctgtgatttcttcctcagtaatttcttcctcagtcacttcttctctattcacttcttctccagtcatttcttcctcagtcatttcttcttctacaacaacctccacttctatattttctgaatcatctaaatcatccgtcattccaaccagtagttccacctctggttcttctgagagcgaaacgagttcagctggttctgtctcttcttcctcttttatctcttctgaatcatcaaaatctcctacatattcttcttcatcattaccacttgttaccagtgcgacaacaagccaggaaactgcttcttcattaccacctgctaccactacaaaaacgagcgaacaaaccactttggttaccgtgacatcctgcgagtctcatgtgtgcactgaatccatctcccctgcgattgtttccacagctactgttactgttagcggcgtcacaacagagtataccacatggtgccctatttctactacagagacaacaaagcaaaccaaagggacaacagagcaaaccacagaaacaacaaaacaaaccacggtagttacaatttcttcttgtgaatctgacgtatgctctaagactgcttctccagccattgtatctacaagcactgctactattaacggcgttactacagaatacacaacatggtgtcctatttccaccacagaatcgaggcaacaaacaacgctagttactgttacttcctgcgaatctggtgtgtgttccgaaactgcttcacctgccattgtttcgacggccacggctactgtgaatgatgttgttacggtctatcctacatggaggccacagactgcgaatgaagagtctgtcagctctaaaatgaacagtgctaccggtgagacaacaaccaatactttagctgctgaaacgactaccaatactgtagctgctgagacgattaccaatactggagctgctgagacgaaaacagtagtcacctcttcgctttcaagatctaatcacgctgaaacacagacggcttccgcgaccgatgtgattggtcacagcagtagtgttgtttctgtatccgaaactggcaacaccaagagtctaacaagttccgggttgagtactatgtcgcaacagcctcgtagcacaccagcaagcagcatggtaggatatagtacagcttctttagaaatttcaacgtatgctggcagtgccaacagcttactggccggtagtggtttaagtgtcttcattgcgtccttattgctggcaattatttaa

SEQ ID NO: 7494 - protein, 1132 aa, Saccharomyces cerevisiae
MTMPHRYMFLAVFTLLALTSVASGATEACLPAGQRKSGMNINFYQYSLKDSSTYSNAAYMAYGYASKTKLGSVGGQTDISIDYNIPCVSSSGTFPCPQEDSYGNWGCKGMGACSNSQGIAYWSTDLFGFYTTPTNVTLEMTGYFLPPQTGSYTFKFATVDDSAILSVGGATAFNCCAQQQPPITSTNFTIDGIKPWGGSLPPNIEGTVYMYAGYYYPMKVVYSNAVSWGTLPISVTLPDGTTVSDDFEGYVYSFDDDLSQSNCTVPDPSNYAVSTTTTTTEPWTGTFTSTSTEMTTVTGTNGLPTDETIIVIRTPTTATTAMTTTQPWNDTFTSTSTEMTTVTGTNGLPTDETIIVIRTPTTATTAITTTEPWNSTFTSTSTELTTVTGTNGLPTDETIIVIRTPTTATTAMTTTQPWNDTFTSTSTEMTTVTGTNGLPTDETIIVIRTPTTATTAMTTTQPWNDTFTSTSTEMTTVTGTNGLPTDETIIVIRTPTTATTAMTTTQPWNDTFTSTSTEMTTVTGTNGVPTDETVIVIRTPTSEGLISTTTEPWTGTFTSTSTEMTTVTGTNGQPTDETVIVIRTPTSEGLVTTTTEPWTGTFTSTSTEMTTITGTNGQPTDETVIVIRTPTSEGLVTTTTEPWTGTFTSTSTEMSTVTGTNGLPTDETVIVVKTPTTAISSSLSSSSSGQITSSITSSRPIITPFYPSNGTSVISSSVISSSVTSSLFTSSPVISSSVISSSTTTSTSIFSESSKSSVIPTSSSTSGSSESETSSAGSVSSSSFISSESSKSPTYSSSSLPLVTSATTSQETASSLPPATTTKTSEQTTLVTVTSCESHVCTESISPAIVSTATVTVSGVTTEYTTWCPISTTETTKQTKGTTEQTTETTKQTTVVTISSCESDVCSKTASPAIVSTSTATINGVTTEYTTWCPISTTESRQQTTLVTVTSCESGVCSETASPAIVSTATATVNDVVTVYPTWRPQTANEESVSSKMNSATGETTTNTLAAETTTNTVAAETITNTGAAETKTVVTSSLSRSNHAETQTASATDVIGHSSSVVSVSETGNTKSLTSSGLSTMSQQPRSTPASSMVGYSTASLEISTYAGSANSLLAGSGLSVFIASLLLAII

SEQ ID NO: 7495 - DNA, 1689 bp, Saccharomyces cerevisiae
  CDS (1)..(1689)
atgacaatgcctcatcgctatatgtttttggcagtctttacacttctggcactaactagtgtggcctcaggagccacagaggcgtgcttaccagcaggccagaggaaaagtgggatgaatataaatttttaccagtattcattgaaagattcctccacatattcgaatgcagcatatatggcttatggatatgcctcaaaaaccaaactaggttctgtcggaggacaaactgatatctcgattgattataatattccctgtgttagttcatcaggcacatttccttgtcctcaagaagattcctatggaaactggggatgcaaaggaatgggtgcttgttctaatagtcaaggaattgcatactggagtactgatttatttggtttctatactaccccaacaaacgtaaccctagaaatgacaggttattttttaccaccacagacgggttcttacacattcaagtttgctacagttgacgactctgcaattctatcagtaggtggtgcaaccgcgttcaactgttgtgctcaacagcaaccgccgatcacatcaacgaactttaccattgacggtatcaagccatggggtggaagtttgccacctaatatcgaaggaaccgtctatatgtacgctggctactattatccaatgaaggttgtttactcgaacgctgtttcttggggtacacttccaattagtgtgacacttccagatggtaccactgtaagtgatgacttcgaagggtacgtctattcctttgacgatgacctaagtcaatctaactgtactgtccctgacccttcaaattatgctgtcagtaccactacaactacaacggaaccatggaccggtactttcacttctacatctactgaaatgaccaccgtcaccggtaccaatggtttgccaactgatgagaccatcattgtcatcagaacaccaacaacagccactactgccatgactacaactcagccatggaacgacacttttacctctacatccactgaaatgaccaccgtcaccggtaccaacggtttgccaactgatgaaaccatcattgtcatcagaacaccaacaacagccactactgccataactacaactgagccatggaacagcacttttacctctacttctaccgaattgaccacagtcaccggtaccaatggtttgccaactgatgagaccatcattgtcatcagaacaccaacaacagccactactgccatgactacaactcagccatggaacgacacttttacctctacatccactgaaatgaccaccgtcaccggtaccaacggtttgccaactgatgaaaccatcattgtcatcagaacaccaacaacagccactactgccatgactacaactcagccatggaacgacacttttacctctacatccactgaaatgaccaccgtcaccggtaccaacggtttgccaactgatgagaccatcattgtcatcagaacaccaacaacagccactactgccatgactacaactcagccatggaacgacacttttacctctacatccactgaaatgaccaccgtcaccggtaccaacggcgttccaactgacgaaaccgtcattgtcatcagaactccaactagtgaaggtctaatcagcaccaccactgaaccatggactggtactttcacctctactatccactga

SEQ ID NO: 7496 - protein, 562 aa, Saccharomyces cerevisiae
MTMPHRYMFLAVFTLLALTSVASGATEACLPAGQRKSGMNINFYQYSLKDSSTYSNAAYMAYGYASKTKLGSVGGQTDISIDYNIPCVSSSGTFPCPQEDSYGNWGCKGMGACSNSQGIAYWSTDLFGFYTTPTNVTLEMTGYFLPPQTGSYTFKFATVDDSAILSVGGATAFNCCAQQQPPITSTNFTIDGIKPWGGSLPPNIEGTVYMYAGYYYPMKVVYSNAVSWGTLPISVTLPDGTTVSDDFEGYVYSFDDDLSQSNCTVPDPSNYAVSTTTTTTEPWTGTFTSTSTEMTTVTGTNGLPTDETIIVIRTPTTATTAMTTTQPWNDTFTSTSTEMTTVTGTNGLPTDETIIVIRTPTTATTAITTTEPWNSTFTSTSTELTTVTGTNGLPTDETIIVIRTPTTATTAMTTTQPWNDTFTSTSTEMTTVTGTNGLPTDETIIVIRTPTTATTAMTTTQPWNDTFTSTSTEMTTVTGTNGLPTDETIIVIRTPTTATTAMTTTQPWNDTFTSTSTEMTTVTGTNGVPTDETVIVIRTPTSEGLISTTTEPWTGTFTSTIH

SEQ ID NO: 7497 - DNA, 1014 bp, Saccharomyces cerevisiae
  CDS (1)..(1014)
atgacaatgcctcatcgctatatgtttttggcagtctttacacttctggcactaactagtgtggcctcaggagccacagaggcgtgcttaccagcaggccagaggaaaagtgggatgaatataaatttttaccagtattcattgaaagattcctccacatattcgaatgcagcatatatggcttatggatatgcctcaaaaaccaaactaggttctgtcggaggacaaactgatatctcgattgattataatattccctgtgttagttcatcaggcacatttccttgtcctcaagaagattcctatggaaactggggatgcaaaggaatgggtgcttgttctaatagtcaaggaattgcatactggagtactgatttatttggtttctatactaccccaacaaacgtaaccctagaaatgacaggttattttttaccaccacagacgggttcttacacattcaagtttgctacagttgacgactctgcaattctatcagtaggtggtgcaaccgcgttcaactgttgtgctcaacagcaaccgccgatcacatcaacgaactttaccattgacggtatcaagccatggggtggaagtttgccacctaatatcgaaggaaccgtctatatgtacgctggctactattatccaatgaaggttgtttactcgaacgctgtttcttggggtacacttccaattagtgtgacacttccagatggtaccactgtaagtgatgacttcgaagggtacgtctattcctttgacgatgacctaagtcaatctaactgtactgtccctgatccttcaaaacatactactagcatcgtcacaactactaccgaactgtggactggtacttttacttctacatctactgaaatgaccaccgtcaccggtactaatggtcaaccaactgacgaaaccgttattgttgccaaagctccaaccactgccacctcatccagtttgtcatcatcttcttcagaacaaatcaccagctctatcacgtcttag

SEQ ID NO: 7498 - protein, 337 aa, Saccharomyces cerevisiae
MTMPHRYMFLAVFTLLALTSVASGATEACLPAGQRKSGMNINFYQYSLKDSSTYSNAAYMAYGYASKTKLGSVGGQTDISIDYNIPCVSSSGTFPCPQEDSYGNWGCKGMGACSNSQGIAYWSTDLFGFYTTPTNVTLEMTGYFLPPQTGSYTFKFATVDDSAILSVGGATAFNCCAQQQPPITSTNFTIDGIKPWGGSLPPNIEGTVYMYAGYYYPMKVVYSNAVSWGTLPISVTLPDGTTVSDDFEGYVYSFDDDLSQSNCTVPDPSKHTTSIVTTTTELWTGTFTSTSTEMTTVTGTNGQPTDETVIVAKAPTTATSSSLSSSSSEQITSSITS

SEQ ID NO: 7499 - DNA, 1014 bp, Saccharomyces cerevisiae
  CDS (1)..(1014)
atgacaatgcctcatcgctatatgtttttggcagtctttacacttctggcactaactagtgtggcctcaggagccacagaggcgtgcttaccagcaggccagaggaaaagtgggatgaatataaatttttaccagtattcattgaaagattcctccacatattcgaatgcagcatatatggcttatggatatgcctcaaaaaccaaactaggttctgtcggaggacaaactgatatctcgattgattataatattccctgtgttagttcatcaggcacatttccttgtcctcaagaagattcctatggaaactggggatgcaaaggaatgggtgcttgttctaatagtcaaggaattgcatactggagtactgatttatttggtttctatactaccccaacaaacgtaaccctagaaatgacaggttattttttaccaccacagacgggttcttacacattcaagtttgctacagttgacgactctgcaattctatcagtaggtggtgcaaccgcgttcaactgttgtgctcaacagcaaccgccgatcacatcaacgaactttaccattgacggtatcaagccatggggtggaagtttgccacctaatatcgaaggaaccgtctatatgtacgctggctactattatccgctgaaggttgtttactccaatgccgtttcctggggcacgcttccaattagcgtggaattgcctgatggtactactgttagtgatgactttgaagggtacgtttactcttttgacgatgatttaagtcagtcaaattgtactatccctgatccttcaaaacatactactagcatcgtcacaactactaccgaactgtggactggtacttttacttctacatctactgaaatgaccaccgtcaccggtactaatggtcaaccaactgacgaaaccgttattgttgccaaagctccaaccactgccacctcatccagtttgtcatcatcttcttcagaacaaatcaccagctctatcacgtcttag

SEQ ID NO: 7500 - protein, 337 aa, Saccharomyces cerevisiae
MTMPHRYMFLAVFTLLALTSVASGATEACLPAGQRKSGMNINFYQYSLKDSSTYSNAAYMAYGYASKTKLGSVGGQTDISIDYNIPCVSSSGTFPCPQEDSYGNWGCKGMGACSNSQGIAYWSTDLFGFYTTPTNVTLEMTGYFLPPQTGSYTFKFATVDDSAILSVGGATAFNCCAQQQPPITSTNFTIDGIKPWGGSLPPNIEGTVYMYAGYYYPLKVVYSNAVSWGTLPISVELPDGTTVSDDFEGYVYSFDDDLSQSNCTIPDPSKHTTSIVTTTTELWTGTFTSTSTEMTTVTGTNGQPTDETVIVAKAPTTATSSSLSSSSSEQITSSITS

SEQ ID NO: 7501 - DNA, 3228 bp, Saccharomyces cerevisiae
  CDS (1)..(3228)
atgacaattgcacaccactgcatatttttggtaatcttggcctttctggcactaattaatgtggcctcaggagccacagaggcgtgcttaccagcaggccagaggaaaagtgggatgaatataaatttttaccagtattcattgaaagattcctccacatattcgaatgcagcatatatggcttatggatatgcctcaaaaaccaaactaggttctgtcggaggacaaactgatatttcgattgattataatattccctgtgttagttcatcaggcacatttccttgtcctcaagaagattcctatggaaactggggatgcaaaggaatgggtgcttgttctaatagtcaaggaattgcatactggagtactgatttatttggtttctatactaccccaacaaacgtaaccctagaaatgacaggttattttttaccaccacagacgggttcttacacgttttcttttgcaacagtagatgattctgcaattttatcagtcggtggtagcattgcgttcgaatgttgtgcacaagaacaacctcccatcacgtcgactaacttcacaatcaatggtatcaagccatgggatggaagtctccctgacaatatcacagggactgtctacatgtatgcaggctactattatccgctgaaggttgtttactccaatgccgtttcctggggcacgcttccaattagcgtggaattgcctgatggtactactgttagtgataactttgaagggtacgtttactcttttgacgatgacctaagtcagtcaaattgtactatccctgatccttcaatacatactactagcactatcacaactaccaccgagccatggaccggtactttcacttctacatccactgagatgaccaccatcaccgatactaacggtcaattaactgatgaaactgtcattgtcatcagaactccaacaacagctagcaccatcacaactaccaccgagccatggaccggtactttcacctctacatccactgagatgactactgtcaccggtaccaacggtcaaccaactgacgaaactgttattgtcattagaactccaactagtgagggtttgattactacaactaccgaaccatggaccggtactttcacctctacatccactgagatgactactgtgaccggtaccaacggtcaaccaactgacgaaactgttattgtcattagaactccaactagtgagggtttgattactacaactaccgaaccatggaccggtactttcacctctacatccactgaggttaccaccatcactggtaccaacggtcaaccaactgacgaaaccgtgattgtcattagaactccaactagtgagggtttgattactacaactaccgaaccatggaccggtactttcacctctacatctactgagatgactactgtcaccggtaccaacggtcaaccaactgacgaaactgttattgttatcagaactccaaccagtgaaggtctaatcagcaccaccactgaaccatggactggtactttcacctctacatctactgaggttaccaccatcactggtaccaacggtcaaccaactgacgaaaccgtgattgtcattagaactccaactagtgagggtttgattactacaactaccgaaccatggaccggaactttcacctctacatccactgagatgactactgtgaccggtaccaacggtcaaccaactgacgaaactgttattgtcattagaactccaactagtgagggtttgattactagaactaccgaaccatggactggtactttcacttctacatctactgaggttaccaccatcaccggtaccaacggtcaaccaactgacgaaactgttattgtcatcagaactccaactactgccatctcatccagtttgtcatcttcttcaggacaaatcaccagctctatcacgtcttcgcgtccaattattaccccattctatcctagcaatggaacttctgtgatttcctcctcagtaatttcttcttcagtcacttcttctctagtcacctcttcttcattcatttcttcctctgtcatttcttcttctacaacaacctccacttctatattctctgaatcatctacatcatccgtcattccaaccagtagttccacctctggttcttctgagagcaaaacgagttcggctagttcttcctcttcttcctcttctatctcttctgaatcaccaaagtctcctacaaattcttcttcatcattaccacctgttaccagtgcgacaacaggccaggaaactgcttcttcattaccacctgctaccactacaaaaacgagcgaacaaaccactttggttaccgtgacatcctgcgaatctcatgtgtgtactgaatccatctcctctgctattgtttccacggccaccgttactgttagcggcgtcacaacagagtataccacgtggtgccctatttctaccacagagacaacaaagcaaaccaaggggacaacagagcaaaccaaggggacaacagagcaaaccacagaaacaacaaaacaaaccacagtagttacaatttcttcttgtgaatctgacatatgctctaagactgcttctccagccattgtgtctacaagcactgctactattaacggcgttaccacagaatacacaacatggtgtcctatttccaccacagaatcgaagcaacaaactacgctagttactgttacttcctgcgaatctggtgtgtgttccgaaactacttcacctgccattgtttcgacggccacggctactgtgaatgatgttgttacggtctatcctacatggagaccacagactacgaatgaacagtctgtcagctctaaaatgaacagtgctaccagtgagacaactaccaatactggggctgctgagacaaaaacagcagtcacctcttcactttcaagattcaatcacgctgaaacacagacagcttccgcgaccgatgtgattggtcacagcagtagtgttgtttctgtatccgaaactggcaacaccatgagtctaacaagttccgggttgagcactatgtcgcaacagcctcgtagcacaccagcaagtagcatggtaggatctagtacagcttctttagaaatttcaacgtatgctggcagtgccaacagcttactggccggtagtggtttaagtgtcttcattgcgtccttattgctggcaattatttaa

SEQ ID NO: 7502 - protein, 1075 aa, Saccharomyces cerevisiae
MTIAHHCIFLVILAFLALINVASGATEACLPAGQRKSGMNINFYQYSLKDSSTYSNAAYMAYGYASKTKLGSVGGQTDISIDYNIPCVSSSGTFPCPQEDSYGNWGCKGMGACSNSQGIAYWSTDLFGFYTTPTNVTLEMTGYFLPPQTGSYTFSFATVDDSAILSVGGSIAFECCAQEQPPITSTNFTINGIKPWDGSLPDNITGTVYMYAGYYYPLKVVYSNAVSWGTLPISVELPDGTTVSDNFEGYVYSFDDDLSQSNCTIPDPSIHTTSTITTTTEPWTGTFTSTSTEMTTITDTNGQLTDETVIVIRTPTTASTITTTTEPWTGTFTSTSTEMTTVTGTNGQPTDETVIVIRTPTSEGLITTTTEPWTGTFTSTSTEMTTVTGTNGQPTDETVIVIRTPTSEGLITTTTEPWTGTFTSTSTEVTTITGTNGQPTDETVIVIRTPTSEGLITTTTEPWTGTFTSTSTEMTTVTGTNGQPTDETVIVIRTPTSEGLISTTTEPWTGTFTSTSTEVTTITGTNGQPTDETVIVIRTPTSEGLITTTTEPWTGTFTSTSTEMTTVTGTNGQPTDETVIVIRTPTSEGLITRTTEPWTGTFTSTSTEVTTITGTNGQPTDETVIVIRTPTTAISSSLSSSSGQITSSITSSRPIITPFYPSNGTSVISSSVISSSVTSSLVTSSSFISSSVISSSTTTSTSIFSESSTSSVIPTSSSTSGSSESKTSSASSSSSSSSISSESPKSPTNSSSSLPPVTSATTGQETASSLPPATTTKTSEQTTLVTVTSCESHVCTESISSAIVSTATVTVSGVTTEYTTWCPISTTETTKQTKGTTEQTKGTTEQTTETTKQTTVVTISSCESDICSKTASPAIVSTSTATINGVTTEYTTWCPISTTESKQQTTLVTVTSCESGVCSETTSPAIVSTATATVNDVVTVYPTWRPQTTNEQSVSSKMNSATSETTTNTGAAETKTAVTSSLSRFNHAETQTASATDVIGHSSSVVSVSETGNTMSLTSSGLSTMSQQPRSTPASSMVGSSTASLEISTYAGSANSLLAGSGLSVFIASLLLAII

SEQ ID NO: 7503 - DNA, 3969 bp, Saccharomyces cerevisiae
  CDS (1)..(3969)
atgtctctggcacattattgtttactactagccatcgtcacattgctgggattaactaatgttgtctctgcgactacagcggcatgcctgccagcaaactcaaggaagaatggtatgaatgtaaacttttaccagtattcattgagagattcctccacatattcgaatgcagcatatatggcttatggatatgcctcaaaaactaaactgggttctgtcggaggacaaactgatatctcgattgattataatattccttgtgttagttcatcaggcacatttccttgtcctcaagaagatttatatggtaattggggatgcaaaggaattggtgcttgttctaataatccaataattgcatactggagtactgatttatttggtttctatactaccccaacaaacgtaaccctagaaatgacaggttattttttaccaccacagacgggttcttacacattcaagtttgctacagttgacgactctgcaattctatcagtcggtggtagcattgcgttcgaatgttgtgcacaagaacaacctcccatcacgtcgactaacttcaccatcaatggtatcaagccatggaatggaagtccccctgataatattacagggactgtctacatgtatgctggtttctattatccaatgaagattgtttactcaaatgccgttgcctggggtacacttccaattagtgtgacactaccagatggcactaccgttagtgatgactttgaagggtacgtatatacttttgacaacaatctaagccagccaaactgtaccattccagacccttcaaattatactgtcagtactaccataactacaacggaaccatggaccggtactttcacttctacatctactgaaatgaccaccgtcaccggtaccaacggcgttccaactgacgaaaccgtcattgtcatcagaactccaacaactgctagcaccatcataactacaactgagccatggaacagcacttttacctctacttctaccgaattgaccacagtcactggcaccaatggtgtacgaactgacgaaaccatcattgtaatcagaacaccaacaacagccactactgccataactacaactgagccatggaacagcacttttacctctacttctaccgaattgaccacagtcaccggtaccaatggtttgccaactgatgagaccatcattgtcatcagaacaccaacaacagccactactgccatgactacaactcagccatggaacgacacttttacctctacttctaccgaattgaccacagtcaccggtaccaatggtttgccaactgatgagaccatcattgtcatcagaacaccaacaacagccactactgccatgactacaactcagccatggaacgacacttttacctctacttctaccgaattgaccacagtcaccggtaccaatggtttgccaactgatgagaccatcattgtcatcagaacaccaacaacagccactactgccatgactacaactcagccatggaacgacacttttacctctacatccactgaaatcaccaccgtcaccggtaccaatggtttgccaactgatgagaccatcattgtcatcagaacaccaacaacagccactactgccatgactacaactcagccatggaacgacacttttacctctacatccactgaaatgaccaccgtcaccggtaccaacggtttgccaactgatgaaaccatcattgtcatcagaacaccaacaacagccactactgccataactacaactgagccatggaacagcacttttacctctacatccactgaaatgaccaccgtcaccggtaccaacggtttgccaactgatgaaaccatcattgtcatcagaacaccaacaacagccactactgccataactacaactcagccatggaacgacacttttacctctacatccactgaaatgaccaccgtcaccggtaccaacggtttgccaactgatgaaaccatcattgtcatcagaacaccaacaacagccactactgccatgactacaactcagccatggaacgacacttttacctctacatccactgaaatcaccaccgtcaccggtaccaacggtttgccaactgatgagaccatcattgtcatcagaacaccaacaacagccactactgccatgactacaactcagccatggaacgacacttttacctctacatccactgaaatgaccaccgtcaccggtaccaacggcgttccaactgacgaaaccgtcattgtcatcagaactccaactagtgaaggtctaatcagcaccaccactgaaccatggactggtactttcacctctacatccactgagatgaccaccgtcaccggtactaacggtcaaccaactgacgaaaccgtgattgttatcagaactccaaccagtgaaggtttggttacaactacaaccgagccatggaccggtactttcacctctacatctactgagatgaccaccatcactggaaccaacggtcaaccaactgatgaaactgtcattattgtcaaaactccaactactgccatctcatccagtttgtcatcttcttcaggacaaatcaccagctttatcacgtctgcgcgtccaattattaccccattctatcctagcaatggaacttctgtgatttcctcctcagtaatttcttcctcagacacttcttctctagtcatttcttcctcagtcacttcttctctagtcacttcttctccagtcatttcttcttcattcatttcttcccctgtcatttcttctacaacaacctccgcttctatactctctgaatcatctaaatcatccgtcattccaaccagtagttccacctctggttcttctgagagcgaaacgggttcagctagttctgcctcttcttcctcttctatctcttctgaatcaccaaagtctacatattcgtcttcatcattaccacctgttaccagtgcaacaacaagtcaggaaattacttcttcattaccacctgttaccactacaaaaacgagcgaacaaaccactttggttaccgtgacatcctgcgaatctcatgtgtgcactgaatctatctcctctgcgattgtttccacggccaccgttactgttagcggtgccacaacagagtataccacatggtgccctatttctaccacagagataacaaagcaaactacggagacaacaaagcaaaccaaggggacaacagagcaaaccacagaaacaacaaaacaaaccacagtagttacaatttcttcttgtgaatctgacgtatgctctaagactgcttctccagccattgtatctacaagcactgctactattaatggcgttaccacagaatacacaacatggtgtcctatttccaccacagaatcgaagcaacaaactacgctagttactgttacttcctgcggatctggtgtgtgttccgaaactacttcacctgccattgtttcgacggccacggctactgtgaatgatgttgttacggtctattctacatggaggccacagactacgaatgaacagtctgtcagctctaaaatgaacagtgctaccagtgagacaacaaccaatactggagctgctgagacaactaccagtactggagctgctgagacgaaaacagtagtcacctcttcaatttcaagattcaatcatgctgaaacacagacggcttccgcgaccgatgtgattggtcacagcagtagtgttgtttctgtatccgaaactggcaacaccaagagtctaacaagttccgggttgagtactatgtcgcaacagcctcgtagcacaccagcaagtagcatggtaggatctagtacagcttctttagaaatttcaacgtatgctggcagtgccaacagcttactggccggtagtggtttaagtgtcttcattgcgtccttattgctggcaattatttaa

SEQ ID NO: 7504 - protein, 1322 aa, Saccharomyces cerevisiae
MSLAHYCLLLAIVTLLGLTNVVSATTAACLPANSRKNGMNVNFYQYSLRDSSTYSNAAYMAYGYASKTKLGSVGGQTDISIDYNIPCVSSSGTFPCPQEDLYGNWGCKGIGACSNNPIIAYWSTDLFGFYTTPTNVTLEMTGYFLPPQTGSYTFKFATVDDSAILSVGGSIAFECCAQEQPPITSTNFTINGIKPWNGSPPDNITGTVYMYAGFYYPMKIVYSNAVAWGTLPISVTLPDGTTVSDDFEGYVYTFDNNLSQPNCTIPDPSNYTVSTTITTTEPWTGTFTSTSTEMTTVTGTNGVPTDETVIVIRTPTTASTIITTTEPWNSTFTSTSTELTTVTGTNGVRTDETIIVIRTPTTATTAITTTEPWNSTFTSTSTELTTVTGTNGLPTDETIIVIRTPTTATTAMTTTQPWNDTFTSTSTELTTVTGTNGLPTDETIIVIRTPTTATTAMTTTQPWNDTFTSTSTELTTVTGTNGLPTDETIIVIRTPTTATTAMTTTQPWNDTFTSTSTEITTVTGTNGLPTDETIIVIRTPTTATTAMTTTQPWNDTFTSTSTEMTTVTGTNGLPTDETIIVIRTPTTATTAITTTEPWNSTFTSTSTEMTTVTGTNGLPTDETIIVIRTPTTATTAITTTQPWNDTFTSTSTEMTTVTGTNGLPTDETIIVIRTPTTATTAMTTTQPWNDTFTSTSTEITTVTGTNGLPTDETIIVIRTPTTATTAMTTTQPWNDTFTSTSTEMTTVTGTNGVPTDETVIVIRTPTSEGLISTTTEPWTGTFTSTSTEMTTVTGTNGQPTDETVIVIRTPTSEGLVTTTTEPWTGTFTSTSTEMTTITGTNGQPTDETVIIVKTPTTAISSSLSSSSGQITSFITSARPIITPFYPSNGTSVISSSVISSSDTSSLVISSSVTSSLVTSSPVISSSFISSPVISSTTTSASILSESSKSSVIPTSSSTSGSSESETGSASSASSSSSISSESPKSTYSSSSLPPVTSATTSQEITSSLPPVTTTKTSEQTTLVTVTSCESHVCTESISSAIVSTATVTVSGATTEYTTWCPISTTEITKQTTETTKQTKGTTEQTTETTKQTTVVTISSCESDVCSKTASPAIVSTSTATINGVTTEYTTWCPISTTESKQQTTLVTVTSCGSGVCSETTSPAIVSTATATVNDVVTVYSTWRPQTTNEQSVSSKMNSATSETTTNTGAAETTTSTGAAETKTVVTSSISRFNHAETQTASATDVIGHSSSVVSVSETGNTKSLTSSGLSTMSQQPRSTPASSMVGSSTASLEISTYAGSANSLLAGSGLSVFIASLLLAII

SEQ ID NO: 7505 - DNA, 25 bp, Artificial sequence
  primer
atgacaggttactttttaccaccac

SEQ ID NO: 7506 - DNA, 24 bp, Artificial sequence
  primer
ctaagacgtgatagagctggtgat

SEQ ID NO: 7507 - protein, 593 aa, Artificial sequence
  consensus sequence
  Variant (2)..(4): Xaa in position 2 to 4 is any amino acid
  Variant (6)..(9): Xaa in position 6 to 9 is any amino acid
  Variant (11)..(15): Xaa in position 11 to 15 is any amino acid
  Variant (17)..(17): Xaa in position 17 is any amino acid
  Variant (19)..(20): Xaa in position 19 to 20 is any amino acid
  Variant (22)..(22): Xaa in position 22 is any amino acid
  Variant (24)..(25): Xaa in position 24 to 25 is any amino acid
  Variant (27)..(27): Xaa in position 27 is any amino acid
  Variant (33)..(34): Xaa in position 33 to 34 is any amino acid
  Variant (37)..(37): Xaa in position 37 is any amino acid
  Variant (41)..(41): Xaa in position 41 is any amino acid
  Variant (49)..(49): Xaa in position 49 is any amino acid
  Variant (101)..(101): Xaa in position 101 is any amino acid
  Variant (110)..(110): Xaa in position 110 is any amino acid
  Variant (116)..(118): Xaa in position 116 to 118 is any amino acid
  Variant (155)..(155): Xaa in position 155 is any amino acid
  Variant (170)..(171): Xaa in position 170 to 171 is any amino acid
  Variant (174)..(174): Xaa in position 174 is any amino acid
  Variant (179)..(179): Xaa in position 179 is any amino acid
  Variant (191)..(191): Xaa in position 191 is any amino acid
  Variant (197)..(197): Xaa in position 197 is any amino acid
  Variant (202)..(202): Xaa in position 202 is any amino acid
  Variant (205)..(205): Xaa in position 205 is any amino acid
  Variant (218)..(218): Xaa in position 218 is any amino acid
  Variant (236)..(236): Xaa in position 236 is any amino acid
  Variant (265)..(265): Xaa in position 265 is any amino acid
  Variant (270)..(273): Xaa in position 270 to 273 is any amino acid
  Variant (275)..(276): Xaa in position 275 to 276 is any amino acid
  Variant (282)..(282): Xaa in position 282 is any amino acid
  Variant (302)..(526): Xaa in position 302 to 526 is any amino acid
  Variant (528)..(528): Xaa in position 528 is any amino acid
  Variant (534)..(534): Xaa in position 534 is any amino acid
  Variant (537)..(539): Xaa in position 537 to 539 is any amino acid
  Variant (545)..(549): Xaa in position 545 to 549 is any amino acid
  Variant (550)..(558): Xaa in position 550 to 558 is any or no amino acid
  Variant (560)..(560): Xaa in position 560 is any amino acid
  Variant (562)..(562): Xaa in position 562 is any amino acid
  Variant (564)..(565): Xaa in position 564 to 565 is any amino acid
  Variant (566)..(588): Xaa in position 566 to 588 is any or no amino acid
  Variant (590)..(591): Xaa in position 590 to 591 is any amino acid
MXXXHXXXXLXXXXXLXLXXVXSXXTXACLPAXXRKXGMNXNFYQYSLXDSSTYSNAAYMAYGYASKTKLGSVGGQTDISIDYNIPCVSSSGTFPCPQEDXYGNWGCKGXGACSNXXXIAYWSTDLFGFYTTPTNVTLEMTGYFLPPQTGSYTFXFATVDDSAILSVGGXXAFXCCAQXQPPITSTNFTIXGIKPWXGSLPXNIXGTVYMYAGYYYPXKVVYSNAVSWGTLPISVXLPDGTTVSDDFEGYVYSFDDDLSQSNCTXPDPSXXXXSXXTTTTEXWTGTFTSTSTEMTTVTGTNXXXXXXXXXXXXXXXXXXXXXXXXXXXXXXXXXXXXXXXXXXXXXXXXXXXXXXXXXXXXXXXXXXXXXXXXXXXXXXXXXXXXXXXXXXXXXXXXXXXXXXXXXXXXXXXXXXXXXXXXXXXXXXXXXXXXXXXXXXXXXXXXXXXXXXXXXXXXXXXXXXXXXXXXXXXXXXXXXXXXXXXXXXXXXXXXXXXXXXXXXXXXXXXXXXXXXXXXXXXXXXXXXGXPTDETXIVXXXPTTATXXXXXXXXXXXXXXSXSXEXXXXXXXXXXXXXXXXXXXXXXXXXTXXIT

SEQ ID NO: 7508 - protein, 40 aa, Artificial sequence
  protein pattern
  Variant (5)..(5): Xaa in position 5 is Glu or Thr
  Variant (22)..(22): Xaa in position 22 is Ser or Thr
  Variant (25)..(26): Xaa in position 25 to 26 is Asp or Asn
  Variant (30)..(30): Xaa in position 30 is Pro or Ser
  Variant (34)..(34): Xaa in position 34 is Ile or Val
  Variant (39)..(39): Xaa in position 39 is any amino acid
  Variant (40)..(40): Xaa in position 40 is His or Tyr
PISVXLPDGTTVSDDFEGYVYXFDXXLSQXNCTXPDPSXX

SEQ ID NO: 7509 - protein, 52 aa, Artificial sequence
  protein pattern
  Variant (2)..(4): Xaa in position 2 to 4 is any amino acid
  Variant (6)..(6): Xaa in position 6 is Asn or Thr
  Variant (7)..(7): Xaa in position 7 is Asp or Gly
  Variant (19)..(19): Xaa in position 19 is Ile or Val
  Variant (21)..(21): Xaa in position 21 is Asp or Gly
  Variant (25)..(25): Xaa in position 25 is any amino acid
  Variant (26)..(26): Xaa in position 26 is Leu or Pro
  Variant (31)..(31): Xaa in position 31 is Ile or Val
  Variant (34)..(34): Xaa in position 34 is Ala or Ile
  Variant (35)..(35): Xaa in position 35 is Lys or Arg
  Variant (36)..(36): Xaa in position 36 is Ala or Thr
  Variant (41)..(42): Xaa in position 41 to 42 is Ser or Thr
  Variant (43)..(45): Xaa in position 43 to 45 is any amino acid
  Variant (46)..(47): Xaa in position 46 to 47 is Ser or Thr
  Variant (48)..(48): Xaa in position 48 is Glu or Ser
  Variant (49)..(49): Xaa in position 49 is Pro or Ser
  Variant (50)..(50): Xaa in position 50 is any amino acid
  Variant (51)..(51): Xaa in position 51 is Glu, Asn or Thr
  Variant (52)..(52): Xaa in position 52 is Gly, Gln or Ser
TXXXWXXTFTSTSTEMTTXTXTNGXXTDETXIVXXXPTTAXXXXXXXXXXXX

SEQ ID NO: 7510 - DNA, 1086 bp, Saccharomyces cerevisiae
  CDS (1)..(1086)
atgatttctgctaattcattacttatttccactttgtgcgcttttgcgatcgcaacacctttgtcaaaaagagattcctgtaccctaacaggatcttctttgtcttcactctcaaccgtgaaaaaatgtagcagcatcgttattaaagacttaactgtcccagctggacagactttagatttaactgggttaagcagtggtactactgttacgtttgaaggcacaaccacatttcagtacaaggaatggagcggccctttaatttcaatctcagggtctaaaatcagcgttgttggtgcttcgggacataccattgatggtcaaggagcaaaatggtgggatggcttaggtgatagcggtaaagtcaaaccgaagtttgtaaagttggcgttgacgggaacatctaaggtcaccggattgaatattaaaaatgctccacaccaagtcttcagcatcaataaatgttcagatttaaccatcagcgacataacaattgatatcagagacggtgattcggctggtggtcataatacggatgggtttgatgttggtagttctagtaacgtcttaattcaaggatgtactgtttataatcaggatgactgtattgctgtgaattccggttcaactattaaatttatgaacaactactgctacaatggccatggtatttctgtaggttctgttggtggccgttctgataatacagtcaatggtttctgggctgaaaataaccatgttatcaactctgacaacgggttgagaataaaaaccgtagaaggtgcgacaggcacagtcactaatgtcaactttatcagtaataaaattagcggcataaaaagttatggtattgttatcgaaggcgattatttgaatagtaagactactggaactgctacaggtggcgttcccatttcgaatttagtaatgaaggatatcaccgggagcgtgaactccacagcgaagagggttaaaattttggtgaaaaacgctactaactggcaatggtctggggtgtcaattaccggtggttcttcctattctggatgttctggaatcccatctggatctggtgcaagctgttaa

SEQ ID NO: 7511 - protein, 361 aa, Saccharomyces cerevisiae
MISANSLLISTLCAFAIATPLSKRDSCTLTGSSLSSLSTVKKCSSIVIKDLTVPAGQTLDLTGLSSGTTVTFEGTTTFQYKEWSGPLISISGSKISVVGASGHTIDGQGAKWWDGLGDSGKVKPKFVKLALTGTSKVTGLNIKNAPHQVFSINKCSDLTISDITIDIRDGDSAGGHNTDGFDVGSSSNVLIQGCTVYNQDDCIAVNSGSTIKFMNNYCYNGHGISVGSVGGRSDNTVNGFWAENNHVINSDNGLRIKTVEGATGTVTNVNFISNKISGIKSYGIVIEGDYLNSKTTGTATGGVPISNLVMKDITGSVNSTAKRVKILVKNATNWQWSGVSITGGSSYSGCSGIPSGSGASC

SEQ ID NO: 7512 - DNA, 1185 bp, Arabidopsis thaliana
  CDS (1)..(1185)
atgaaaaccatattggatatttcgatcttgataaattttctctgttttggtattgtatacggcaaaaattacaacgtactcaattttgatgccaaaggagatggtcaaactgatgattcagaggcttttctacaagcatggactgctgcatgtggcggagacggggacataaaaacacttcttataccttccggcaaaacatttttacttcaacctactgtgtttcaaggcccatgtaaatctagttcgataaaagttcagttggatggcaccatcgttgcacctagtgacaaattcgcatggtcggaccccatctcccgaatgtggatcaaattttcaactgtgtctggcctaataatcgttggttcgggaaccattgatagtcgtggttcatctttttgggagcttaatctgaaagcttctcaacgacctacagcattacatatcagcaaatgtgacaaccttaggataaacgggataacatcgattgatagtccaaaaaatcatatatcaatcaaaacatgtaatactgttgcaatatcaaatataaatctttttgcacctgagacaagtcccaatacagatgggattgatataagtgactcgactaatatcaacatatttgactctacaattcaaactggtgacgattgtatagcaatcaatagtggaagttctaatattaacatcactggaatcaattgtggacctggtcatgggataagtgtggggagtttaggagcaggtggagcagaagctaaagtgagtgatgttcaagtgacacattgcactttcaatcagacgacgaatggagctagaatcaagacatggctgggtggacaaggatatgcaagaaacataagttttacggacatcacactcgttaacacaaaaaatccaattataatcgaccaacattatatagataaaggacgtcttacagaggaatcagcagtagctattagtaatgtaaaatttgtcgattttcgcggaacatcgtcaaataaaaatgctataacgcttaaatgtagcgaaactacacattgtgtagacgtcgttatggatggaattgatattaccatggcaaatggaggaaagcctaaagttaattgtcaatatgttgatggagagtccagtgacactgatttgatgcgagactgctttaaaaataacactagttcttga

SEQ ID NO: 7513 - protein, 394 aa, Arabidopsis thaliana
MKTILDISILINFLCFGIVYGKNYNVLNFDAKGDGQTDDSEAFLQAWTAACGGDGDIKTLLIPSGKTFLLQPTVFQGPCKSSSIKVQLDGTIVAPSDKFAWSDPISRMWIKFSTVSGLIIVGSGTIDSRGSSFWELNLKASQRPTALHISKCDNLRINGITSIDSPKNHISIKTCNTVAISNINLFAPETSPNTDGIDISDSTNINIFDSTIQTGDDCIAINSGSSNINITGINCGPGHGISVGSLGAGGAEAKVSDVQVTHCTFNQTTNGARIKTWLGGQGYARNISFTDITLVNTKNPIIIDQHYIDKGRLTEESAVAISNVKFVDFRGTSSNKNAITLKCSETTHCVDVVMDGIDITMANGGKPKVNCQYVDGESSDTDLMRDCFKNNTSS

SEQ ID NO: 7514 - DNA, 1302 bp, Arabidopsis thaliana
  CDS (1)..(1302)
atggcccgttgtaccaaccttgttaccgttttcctattatgggctcttttgatgttctcatggtgtaaagcttcaagaatcagccctaatgtatatgaccattcttataaaaggttcaaatccgatagcttaatcaagcgaagagaggacatcacgggattgagaagttttgtaagagcctctttgcggactccaaccaccgttagtgtttctgattttggagctaaaggagatggaaaaaccgatgacacgcaggcgttcgtgaatgcgtggaagaaagcatgttcttcaaatggagctgttaatctcctagttcctaaagggaatacttatctccttaagtctattcaattaactggtccatgcaattctattctcaccgttcagatattcggaacgttatccgcatctcaaaaacgatcggattacaaagatatcagcaaatggataatgtttgatggcgttaacaatctatcagtcgatggaggcgacactggggttgtggacggaaacggcgaaacgtggtggcaaaactcatgcaaacggaacaaagctaagccatgcacaaaagccccaacggctcttactttttacaactcgaaaagtctgatagtgaagaatctgaaggtgagaaatgcacagcagatccagatttcgattgaaaaatgctccaacgttcaggtctctaatgtcgtggtaactgcgcctgcggatagtcctaacaccgatggtattcatatcactaacacccaaaacattcgagtctccgaatccatcattggaacaggcgatgattgcatatctattgaaagtggatcacaaaatgttcaaatcaatgatataacttgcggtcccggtcacggtatcagtattgggagccttggagatgacaattcaaaggcttttgtctcaggcgtgactgtggatggtgctaagctttccggtacagacaatggagtaagaatcaaaacttaccagggagggtcaggaactgctagcaatattatatttcaaaacattcagatggataatgttaagaatccgatcataatcgaccaagactactgcgacaagagcaaatgcactacagagaaatccgcggtccaagtgaagaacgtggtgtaccgggacataagtggcactagcgcatcggaaaacgcaataacgtttaactgcagcaagaactatccatgccaaggaattgtgcttgacagagtgaacattaaaggaggaaaagcaacttgcaccaatgctaatgtggttgataaaggagctgttctgcctcagtgcaactccacttag

SEQ ID NO: 7515 - protein, 433 aa, Arabidopsis thaliana [sequence omitted]

SEQ ID NO: 7516 - DNA, 1080 bp, Gibberella zeae PH-1
  CDS (1)..(1080)
atgttctcttccatgatccttctcagcggcctggttgcctcagcctttgcccaccccactgttgagccccgtgccagctgcacctttactgatgctgcttctgctatcaagggcaagggtagctgctctaccattatcctcaacaacattgccgtccctgctggcactactcttgatcttaccaagctcaaggatggcactcatgtcatcttccaaggaaagactacctttggctatgatacctgggaaggtcccctgatctccttcactggaaacaaccttctcatcgaaggtgccgatggccactccattgactgtcagggtcagcgctggtgggatggcaagggcagcaacggtggcaagaccaagcccaagttcttcagtgcccattctctccagaactccaacatcaagaacttgaacgttatcaacactcccgttcaggctttcagcatcaacggagtcaccaacctcggtgtctacaacgtccacatggacaactctctgggagatacccagggtggacacaacactgacgctttcgatgtcggctcctccaccggtgtttacatctccggcgctgtcgtcaagaaccaggacgactgcctcgccatcaactccggcaccaacatcaccttcactggtggtaactgcagtggtggtcacggtctttccatcggatccgttggaggtcgatccaacaacgacgtcaagaccgtccgcattctcaactcatccatctccaactccgacaacggtgttcgcatcaagaccgtttctggagctaccggttccgtctccgacgtcaagtacgattccatcactcttagcaacattgccaagtacggtattgtcattgagcaggattacgagaacggctctcccactggtacccctactgctggtgttcccatcaccgatgtcaccatcaacaaggttaccggatctgtcaagtccagcggtaccgatatctacattctttgcgctagctgcaagaactggacctggaccaacaacaaggtcaccggtggtaagacctctgacaagtgccagggtgttccttctggagcttcttgctaa

SEQ ID NO: 7517 - protein, 359 aa, Gibberella zeae PH-1
MFSSMILLSGLVASAFAHPTVEPRASCTFTDAASAIKGKGSCSTIILNNIAVPAGTTLDLTKLKDGTHVIFQGKTTFGYDTWEGPLISFTGNNLLIEGADGHSIDCQGQRWWDGKGSNGGKTKPKFFSAHSLQNSNIKNLNVINTPVQAFSINGVTNLGVYNVHMDNSLGDTQGGHNTDAFDVGSSTGVYISGAVVKNQDDCLAINSGTNITFTGGNCSGGHGLSIGSVGGRSNNDVKTVRILNSSISNSDNGVRIKTVSGATGSVSDVKYDSITLSNIAKYGIVIEQDYENGSPTGTPTAGVPITDVTINKVTGSVKSSGTDIYILCASCKNWTWTNNKVTGGKTSDKCQGVPSGASC

SEQ ID NO: 7518 - DNA, 1086 bp, Aspergillus nidulans FGSC A4
  CDS (1)..(1086)
atgcatttccttcaaaactcccttattgctgcggcaatgggcgctgcgctggtcgctgccgcccctgctgctgatcttgatgctcgaagctcgtgcaccttcacctctgcctctgcggccaagtctggcgcatccaagtgctccactgtcaccctcaagagcatccaagttcctgccggtgagacccttgacctgaccggtctcaaatcgggtgctactgtacgcgagacaacctttggctacaaagaatggaaaggaccgctgatctccatgtccggtgacaaaatcacggttaagcaagcctctggcgcaaagatcaactgcgacggggcccgctggtgggacaccaagggcagcaacggcggcaagaccaagcccaagttcttcagcgcgcataagctgaacaactccaagattcaggggctgaagatctacaacacccctgtccagggattcagtatccagtccgaccacctgaccatttcggacgtgaccatcgacaactccgccggcaccagcaagggccacaacaccgatgcctttgacatcggctcctcgacgtacattaccatcgacggtgcgactgtctacaaccaggatgactgtattgccattaactccggcgagcacatcaccttcaccaacggatactgttccggcggccatggcttgtctattggctccgtcggcggccgcagcgacaacaccgtcaagagcgtcaccatctccaacagcaaggtcgtcgactcccaaaacggcgtccgcatcaagaccgtctacaaggctaccggctccgtcaccgatgtcaccttccaggacatcgaactctctggaatcaccaagtacggcctcattgttgagcaggactatgagaatggtagcccaacaggtacccctaccaacggtgtcgaggttgaagatatcaccttcaagaagattaccggctctgtggatagcagtgccacacgtgtcaatatcctctgcgggtcagggagctgcaaagactggacttggtctggggttgatattaccggcggaaagaagagctctaagtgcaagaatgttccgtctggtgcttcgtgctag

SEQ ID NO: 7519 - protein, 361 aa, Aspergillus nidulans FGSC A4
MHFLQNSLIAAAMGAALVAAAPAADLDARSSCTFTSASAAKSGASKCSTVTLKSIQVPAGETLDLTGLKSGATVRETTFGYKEWKGPLISMSGDKITVKQASGAKINCDGARWWDTKGSNGGKTKPKFFSAHKLNNSKIQGLKIYNTPVQGFSIQSDHLTISDVTIDNSAGTSKGHNTDAFDIGSSTYITIDGATVYNQDDCIAINSGEHITFTNGYCSGGHGLSIGSVGGRSDNTVKSVTISNSKVVDSQNGVRIKTVYKATGSVTDVTFQDIELSGITKYGLIVEQDYENGSPTGTPTNGVEVEDITFKKITGSVDSSATRVNILCGSGSCKDWTWSGVDITGGKKSSKCKNVPSGASC

SEQ ID NO: 7520 - DNA, 1095 bp, Ustilago maydis 521
  CDS (1)..(1095)
atgcctttcgacgccatggcctgccttttgctggttggttgggtgctgttgagcttgggtaccagcaacacgcaggcagctgactgcacatttgcagatgcagcaagtgtcaagttggggaagaggtcttgcagaatgatcacgctctccagcatcaaggtgccagctgggcagacgctggacctgacgggtctccgtacaggcacaaaggtgatctttgagggcacgaccacattcggttacgagacttggcctggcccattgatcgcggtgtcgggcaagaacatcgacattagcgggagcagcgggtcggtgttggacgcgggaggagggcagtggtgggatgggaagggaagcaacggtggcaagacgaaaccgaaattcttgttcgctcatgggctgatcaacagcagcattcgatatctcaacgtcaagaacacgccggtacaagcgttcagcatcaatggttgctccaacttgagagtagatcacgtaacaatcgacaattcagcaggcgatgtgaatcgactgggacacaacacggatgcatttgatgtgggaaactcggacggtgtgttcatcacgaacgccaacgttcgcaaccaagatgactgccttgcgatcaattcgggaaccaacatcctcttctccggcggctactgctctggaggtcacggcttgtcgattggtagtgtgggcggtcgcagcgacaatacagtggacggtgtgcatatcgtcaactcgcaagtggtcgacagccagaacgcggtgcgcatcaagacagtgtcgggtgctacgggtgtggtgaataatgtgacgtattccaacatcaaattgtcgggtattttcaagaacgggatcgatattcagcaagactacctgaatggccgaccaacgggcaagccgaccaacggtgttaagatcaccaacatccacatgaacggcatcacagggacggtcaacccgggagcgacagaggtgtatgtgctttgtggtcaaggatcgtgctcgagatggcgatggtccggtgtgtcgatcagcggtggtctgaggagtaccaaatgcactggagttccctcaggagcattttgctga

SEQ ID NO: 7521 - protein, 364 aa, Ustilago maydis 521
MPFDAMACLLLVGWVLLSLGTSNTQAADCTFADAASVKLGKRSCRMITLSSIKVPAGQTLDLTGLRTGTKVIFEGTTTFGYETWPGPLIAVSGKNIDISGSSGSVLDAGGGQWWDGKGSNGGKTKPKFLFAHGLINSSIRYLNVKNTPVQAFSINGCSNLRVDHVTIDNSAGDVNRLGHNTDAFDVGNSDGVFITNANVRNQDDCLAINSGTNILFSGGYCSGGHGLSIGSVGGRSDNTVDGVHIVNSQVVDSQNAVRIKTVSGATGVVNNVTYSNIKLSGIFKNGIDIQQDYLNGRPTGKPTNGVKITNIHMNGITGTVNPGATEVYVLCGQGSCSRWRWSGVSISGGLRSTKCTGVPSGAFC

SEQ ID NO: 7522 - DNA, 1071 bp, Lygus lineolaris
  CDS (1)..(1071)
atgtggaataacatgaaccccatcggaggcctcctcctagtcatcgtatctgcttacggtgccgtagtcacaaattacaatcaactgggtgctgccaaacagggtaacctcatcaccttgaaggaccttcaggtaccggctggagtcactttggacctgactaaattgaaacctggaacgacagtagagttttctggacgcaccactttcggataccatgagtgggctggtcctctggtcaaagttagcggtaagaacctgaagatcgtcggtctgccaggcaatctcttggatggtgaagggaaacgatggtgggacggcaaaggaggcaatggtggagtagcgaaacccaggttcatggaagtcaacattgaagactctaccattagcggtttgaacatcaagaacccacctgcatggtgttttgtagccaattattgtaaaaacatccacatttcgaacctcaacattgacatcaaagatggcgataagaaagcaggaggacacaacactgatggtattggcgtcggttacagtaataatgtgacgatcctcaactgtaaagtccataatcaagatgattgtttcgttactggagctggtagcgatatcctgatcgacaacttgtcctgtactggaggacacggaatttcaattggttctttgggtcgtggagctgtcgttgaaagggtgaccgtgaagaatagtaaaatcatcaagaatatggttggagtcaggattaaatccaccagaggagagactggggcgattagggacatcacttttgacaacatcgaactccaaggaatcacaaggtacggtatcattgtggaaggcaactacctcaactcaggatctgcaggtgatgcgaccccgttccccatcgaaaatatcgtcttcaacaacgtgcgaggaagcgtagttcgcaaggctactaacatatatgtgaacattcatcccaccagtggtaagaactggaggtggagcaacattaacgtcactggaggtcagaaagagctcaaatgtattggagttcctgcaggcgtgaatgtcaattgcggcaagaagtaa

SEQ ID NO: 7523 - protein, 356 aa, Lygus lineolaris
MWNNMNPIGGLLLVIVSAYGAVVTNYNQLGAAKQGNLITLKDLQVPAGVTLDLTKLKPGTTVEFSGRTTFGYHEWAGPLVKVSGKNLKIVGLPGNLLDGEGKRWWDGKGGNGGVAKPRFMEVNIEDSTISGLNIKNPPAWCFVANYCKNIHISNLNIDIKDGDKKAGGHNTDGIGVGYSNNVTILNCKVHNQDDCFVTGAGSDILIDNLSCTGGHGISIGSLGRGAVVERVTVKNSKIIKNMVGVRIKSTRGETGAIRDITFDNIELQGITRYGIIVEGNYLNSGSAGDATPFPIENIVFNNVRGSVVRKATNIYVNIHPTSGKNWRWSNINVTGGQKELKCIGVPAGVNVNCGKK

SEQ ID NO: 7524 - DNA, 1098 bp, Lygus lineolaris
  CDS (1)..(1098)
atgggtacctcaggcttagctcttgggtgcttgttcttcgtggttgcatccgcatcagcacaatacttcgagttgaagaacgtcaaccaactggctgaggccaagaagttccagaaaatcgtcatcagagacctccaagtcccggctggtgtaacgttggacttgtccaacttgaagccaggaacaaccgtcgagtttgcaggaagaattactttcggctacaaggaatggaaaggaccgcttgtcaaggtcaccggtaaacagctgacaatcatggctcacagttacgcgagatttgacggtgaaggtcacagatggtggaagggaggtcgcgagtcgaagcttgtgaagccgaggttcttcgaagctatcgttgacgattcgaccatcacgggtttgtacttcaagaatactccagccccttgcttcctctgcaactggtgccacaacgttgccatttccaaaataaccgttgataccaaagacgccggcgacggcagggctggaagggcgttcaacactgatggcatcagtttgggatacgtcaagaacgttactgttcgcgacagctacgttttcaaccaagacgactgcttcgtcacgggagccggcgaagacatgctaattgacaatctgacctgcgaaggaggaaatggaatcagtgtcgggtctcttggaaatggcgctgatgtcgtgaggtgcacaatcagaaacagcagggtcaccaacagcttgaatggtctgcgcctcaagtcagagaccaacgcagtgggtctccacagaggcgttacatttgaaaacatcgaactcaaggatattcatcaatatggaattagcatctacggaaactacgggcccacatacccaactggtgagccaacattcttcatcatggatcagctgaccatgaggaacatcagaggaaccatggcggctcctggtggtgccaacgtttggatttggctccataaagacagtgctaggaactggaagtgggaaaatgtcaacgtggttggaggaaagagcgccatgttccgcccaccactcacgtgcaaaggagttcctccgaatcttggaatccgatgtgctgagaaatga

SEQ ID NO: 7525 - protein, 365 aa, Lygus lineolaris
MGTSGLALGCLFFVVASASAQYFELKNVNQLAEAKKFQKIVIRDLQVPAGVTLDLSNLKPGTTVEFAGRITFGYKEWKGPLVKVTGKQLTIMAHSYARFDGEGHRWWKGGRESKLVKPRFFEAIVDDSTITGLYFKNTPAPCFLCNWCHNVAISKITVDTKDAGDGRAGRAFNTDGISLGYVKNVTVRDSYVFNQDDCFVTGAGEDMLIDNLTCEGGNGISVGSLGNGADVVRCTIRNSRVTNSLNGLRLKSETNAVGLHRGVTFENIELKDIHQYGISIYGNYGPTYPTGEPTFFIMDQLTMRNIRGTMAAPGGANVWIWLHKDSARNWKWENVNVVGGKSAMFRPPLTCKGVPPNLGIRCAEK

SEQ ID NO: 7526 - DNA, 1056 bp, Lygus lineolaris
  CDS (1)..(1056)
atgagtccttacatctgtggaattttgatgtgcgtcgcagcagcttcggctgttgatgtttggaatctgcagcagcttgaggctgccaaaagaggcaacgatctcaccatcaatgtcagggacatattcgttccagctggccagactctgaattttgaattcgtcaagccaggaaccaccattgtgtttagaggacgtgttactttcggatacaaagaatggagaggacccctcatcattctaaaagggagaaatcttaaaataaagggtggagctggacacatttttgacggtgaaggccgccgttggtgggacggtacaggaaccaacagtggtaagataaagccttacatgttctacgttcagttggcggactcaagcgtaagaggtttgaccatcaagaattcccccgctcacactttcgctattaatgattgcaaccacatctccatcaacaacgtcatgattgataacagagatgggaacaggtttggaggccacaatactgatggatttgatgtggctaaatcacaccgtgtcatcattgccaacagcacgatctacaatcaggatgattgcttggccatcaactcaggtactgagatcacattccaaaggaacaagtgtatcggaggacacggcattgcagtggcagttggaggataccaagtgaatgaagccaggaacatcgtgatcaggggttgtcgttgcatacaaacgaagtacggagttcgtatcaagaccctgttgaatggcagagggattgtcaaaggagtcaagatcgaaaatatcctcctcaaggacgtcactgatgctggacttctcatcatcggtaattatctgaattcaggaccaaaaggtgagccgactggaggcatcccgatagaggatttgacggtgaacaatgttcgtggaaacgtgctcgctaagggaaccaatatcaacgtcttggtggccaacgccaggaactggcaatggagttcgaacattcaaggaggacagaggagactgccatgcaagggtattcccaacggtcttcgcattccctgcggttaa

SEQ ID NO: 7527 - protein, 351 aa, Lygus lineolaris
MSPYICGILMCVAAASAVDVWNLQQLEAAKRGNDLTINVRDIFVPAGQTLNFEFVKPGTTIVFRGRVTFGYKEWRGPLIILKGRNLKIKGGAGHIFDGEGRRWWDGTGTNSGKIKPYMFYVQLADSSVRGLTIKNSPAHTFAINDCNHISINNVMIDNRDGNRFGGHNTDGFDVAKSHRVIIANSTIYNQDDCLAINSGTEITFQRNKCIGGHGIAVAVGGYQVNEARNIVIRGCRCIQTKYGVRIKTLLNGRGIVKGVKIENILLKDVTDAGLLIIGNYLNSGPKGEPTGGIPIEDLTVNNVRGNVLAKGTNINVLVANARNWQWSSNIQGGQRRLPCKGIPNGLRIPCG

SEQ ID NO: 7528 - DNA, 1086 bp, Kluyveromyces marxianus
  CDS (1)..(1086)
atgttattcagcaacaccttattgatcgcagcagctagtgcattattagctgaagcttctccattggaaaagagagacagttgtaccttgagtgggaagacagccggaggtggtttgtccaactgtgccacggtcactgtcaacaacgtcgaagtcccatctggtaagactttggacttgacaggcttgccagacggtgcgacagttaatttcgtcgggcaggttacctttggttacgatgaatgggtgggtccattggtctccatctccggtaagaacatcaaggtggtaggtaaatctggccacttgttagatggtgatggtgcacgttggtgggacgggaagggtgacggtggtaaaaagaagcctaagttcatgagcttgagattaactggcaactcagatgtcggtgggttgcaaatcaagaataccccaattcaagctatctcagtgaactcttgtagtgacactgtaattcacgatgtcaccattgacaacagagatggtgacaaggacaacttgggtcacaacactgacggtttcgatgttggtaacgttaacaacgtcaccattgagaacagtcatgtctacaaccaagatgactgtatcgccgtcaactccggtaccggtgtctacttcaagaacaactactgttctggtggtcatggtgcttccattggttcagtcggtcttcgctcaaacaatgtggttgacaccgtttacttcgagaacaaccaaattgtcaactctgacaacggtttgagaattaagaccattcaaaaggccactggttccgtcaacaacgtgcacttcttgtccaacactatctccggcatcagaaagtttggtattgttgttgaaactgattacagcaatggatccaccaccggtaccccaggtagcaaggtcccaatcaccaacttcgaagtcgatggtttgactggttcagttgactcttccgcttacagagtcaagatcttcgttgctggtgcttctaagtggacttggaagaatgttgatatcactggtggttcttctttcggttcatgtactggtattccatctggtagcggagccttctgttaa

SEQ ID NO: 7529 - protein, 361 aa, Kluyveromyces marxianus
MLFSNTLLIAAASALLAEASPLEKRDSCTLSGKTAGGGLSNCATVTVNNVEVPSGKTLDLTGLPDGATVNFVGQVTFGYDEWVGPLVSISGKNIKVVGKSGHLLDGDGARWWDGKGDGGKKKPKFMSLRLTGNSDVGGLQIKNTPIQAISVNSCSDTVIHDVTIDNRDGDKDNLGHNTDGFDVGNVNNVTIENSHVYNQDDCIAVNSGTGVYFKNNYCSGGHGASIGSVGLRSNNVVDTVYFENNQIVNSDNGLRIKTIQKATGSVNNVHFLSNTISGIRKFGIVVETDYSNGSTTGTPGSKVPITNFEVDGLTGSVDSSAYRVKIFVAGASKWTWKNVDITGGSSFGSCTGIPSGSGAFC

SEQ ID NO: 7530 - DNA, 2291 bp, Botrytis cinerea
  CDS (867)..(2015)
caaacggccgatccaaccttttctttttactatcagattgaaattccaaaaatgtaatccctacgattctagatggcactcgcaaaaccatcagttagaatctcaggggttcttaaccacaccaatcatatccttctaaacttccatcaaatctctagtgcagccgtcgtttgttgacatttcatcaactcaaaacatccaacaacttcgccgcatcattttttgggttagtcgttggttaattacactaattgaggcgttgtgctctggaattagtctagaagagctccaatttcatcaccttgacaagtaattaaggaggaacggtacttcgaaagtacttcgaaattacttcggagtgatgttgtaatataccggagggtctagctaagattgccttttatgcttgtccaaagcttcttttgcttcgtttcatcttccaagcctttcgttcccccttgatgtatagcccattcaacaagaaagtggtgacattttgtactccacaaggcaatctctccttatttcaaagcttatgtttgatgatgttccaaggatcgctggggtcagaatgcggaccttgatcttacatggcagagcaaaagcgtaccatagcatcaaatatactttggctcaccgcgggttaggtttaccgctgttaacatttcgcatcaacagccgacggcggattcaaccgggttccacttctttgatgcttttccgaatttcaatcatgtatttacatatataaggaagcttcgaatacctttttttcattcctcatctcatcatcacttacattcttttccatactgtctagtacattcactctttaaacttacattcttttaacactactagccaatatggttcaacttctctcaatggcctccggcctccttgcgctgagcgcaatcgtctctgctgctccagcaccagcaccaaccgcagcaccaaacccagctgaggctctcgccgctatcgagcaacgtggtaccgcctgtaccttctccggatctggcggtgctgcagccgcttccaagtccaaggcttcctgcgccaccatcgtcctcagcgccctctccgtcccatccggtactactcttgacttgactggcctcaagtccggcacccaggtcatcttcgagggtaccaccaccttcggttacgaagaatggtccggtcctctcttctctgtctccggaactgacatcactgtcaagggtgcctccggcagcaagcttgatggtcaaggagccaagtactgggatggtaagggaaccaacggtggaaagaccaagccaaagttcttctacgcccactccttgaagggtaaatcaacaatctctggtatcaacatcttgaactctccagttcaagtcttctccatcaacggtgcttccggtcttactctctccaacatcaacattgacaactctgctggagatgctggttcccttggccacaacaccgatgctttcgatgttggttcctccagcgatatcaccatctccggtgccgtcgttaagaaccaagatgactgtctcgctatcaactccggtactggtattaccttcaccggtggaacctgttccggtggtcacggtctctccatcggatctgtcggtggacgttccgacaacactgtctccgatatcatcatcgaatcatctactgtcaagaactctgccaacggtgtccgtatcaagactgtctccggtgccactggatccgtctccggcgttacctacaaagacatcaccctctccggcattacatcctacggtgttgtcgttcaacaagattacaagaacggttccccaactggtaccccaacttcaggtgtccccatcactgatgtcactttctccaacgtcaagggtaccgtcgcctccggtgccaccaatgtctacgttctttgcgccaagtgctctggctggtcttgggatgtcagtgttagcggtggtaagacctccagcaagtgtgctggtctcccatctggtgtcaagtgttaaacatcttaacaccttgaccatcaaaccctttgcagggtttggaacaattttatagaaggggatggggggtggtgttgttggagcagtgctcagtgttcgcgttctttgtatatatagcttctattgtccacatatcgactgtttaaaccattgtaatcgaattaatttgattaccttccaaaactttagcttccaatcatgctcttcagtgaactctccaggtctctgtgaaaccaatcgatttctcgccgtataagtcttaccctctgtatcagc

SEQ ID NO: 7531 - protein, 382 aa, Botrytis cinerea
MVQLLSMASGLLALSAIVSAAPAPAPTAAPNPAEALAAIEQRGTACTFSGSGGAAAASKSKASCATIVLSALSVPSGTTLDLTGLKSGTQVIFEGTTTFGYEEWSGPLFSVSGTDITVKGASGSKLDGQGAKYWDGKGTNGGKTKPKFFYAHSLKGKSTISGINILNSPVQVFSINGASGLTLSNINIDNSAGDAGSLGHNTDAFDVGSSSDITISGAVVKNQDDCLAINSGTGITFTGGTCSGGHGLSIGSVGGRSDNTVSDIIIESSTVKNSANGVRIKTVSGATGSVSGVTYKDITLSGITSYGVVVQQDYKNGSPTGTPTSGVPITDVTFSNVKGTVASGATNVYVLCAKCSGWSWDVSVSGGKTSSKCAGLPSGVKC

SEQ ID NO: 7532 - DNA, 1104 bp, Phaedon cochleariae
  CDS (1)..(1104)
atgtcgatcagattgatagccgtactctcagctgcatcaattgcagtcacatcagctactccggttgctgattcgagctgcactatttccagcttcgaccaagtagcttcagtgttagctgaatgtacagacatcgtagtatccaatcttgaagtacctgctggcgaaactttgaatcttgagaccaagaaaaaaggagttaccataactttcgagggtaagactaccttcgcatataaagaatggaccggacctcttctgagggtaaaaggaaaagccatcactgttgtgggagctaaaggctcagtccttgatggacaaggacagctctattgggatggcaaaggtggaaacggaggaataaagaagccgaaatttttcaaaataaaggcaacagaaggttcccatttcaaaaatatcaatttactgaactgcccagtacaagtgcactcaattgatcattctggaccactcactctcagtggatggaacattgatgtttcccaaggagacaaagatgcattgggccacaatactgatggattcgacatcaacaccacagatcaactgacaatcgaagataccgtggtcaaaaaccaagatgattgcatcgcagtcaaccaaggcacaaatttcctctttaacaatttggattgttccggaggccatggtttgagtctgtcagttggcaccagccatgaaattatcaagaacaccgtcagaaatgtcactttctctaattcagttgttcgcaaatcgaggaatgggatccatatcaaaacaacataccaattccggggaaggtatccatggaggatgttaacttacagcaacattgccatggaaggtatctggaagtatgctgtcaacgtagaacaggactataagaagggcaaacccactggaatccccgttggaaacatacccatcaaaggtttacatctggaaaaagtcaccggaactttgaccggagaagaatcgactccggtgtatatcatttgcgctgatggtgcttgcagcaacttcaactggtcgggtgtatcatttgaaggtgcttcgcacgctagtaactgtagttacgtacctactggctattcttgttga

SEQ ID NO: 7533 - protein, 367 aa, Phaedon cochleariae
MSIRLIAVLSAASIAVTSATPVADSSCTISSFDQVASVLAECTDIVVSNLEVPAGETLNLETKKKGVTITFEGKTTFAYKEWTGPLLRVKGKAITVVGAKGSVLDGQGQLYWDGKGGNGGIKKPKFFKIKATEGSHFKNINLLNCPVQVHSIDHSGPLTLSGWNIDVSQGDKDALGHNTDGFDINTTDQLTIEDTVVKNQDDCIAVNQGTNFLFNNLDCSGGHGLSLSVGTSHEIIKNTVRNVTFSNSVVRKSRNGIHIKTTYQFRGRYPWRMLTYSNIAMEGIWKYAVNVEQDYKKGKPTGIPVGNIPIKGLHLEKVTGTLTGEESTPVYIICADGACSNFNWSGVSFEGASHASNCSYVPTGYSC

SEQ ID NO: 7534 - DNA, 1113 bp, Claviceps purpurea
  CDS (1)..(1113)
atgtattctcttctcatgcttttgctgcccgtctggacgggtagctttgtgtcggctgcacccgcagtttctagggctgcggcgctgtccggtgccgattgcacattttccgatgtcgcgcaggcgattcagaagaaaactagctgcagcaccatcactctgcgtaaccttaaagtgccggccggcaagactctcgacctgagcgacttgaacgatggcactcgcgtcatcttcactggccgaacaacattcgaataccaagagtgggaaggccccctcatcgccgtgtcgggaacgaacatcaaggtgtcgggctcccccggtaacatcattgactgcgaaggtcaacgatggtgggacggcaagggcaccaacggtcaaggcaagaagaagcccgacttcttcaacgcccacgacctcatcaactccgagatcagaaacctgaacgtgctcaacacccccgcacacgcattcagcatcagccacgccgagaacctgggcattttcaacgtcaacatcgacgactctgccggtgatacccagggaggacacaacactgacggcttcgacattggcaattcgaacggcgtcaccatctctggctgctcggtccgcaaccaggacgactgcatggccatcaactctggcaccaacatcacctttgtgaatggcttctgctcgggaggccatggtctctccatcggatccgtcggcttccgcagctccaacactgtcaagggcgtgcacattgccaactccaaagtcaccaagtctatgtacggcgtccgcatcaagaccatcgccggcgccgagggtgccgtctcggacgttgtgtacgacaacatctccatgagtgagatttctgatatcggcatcgtcatccagcaggactacaagaacggtaaaccaactggaaatcccaccactggcgtccccatcaccaacctcactgttaacaaggtgaccggtaacgtcaagcccggcggcgccaacgtgcacattctctgcggctcgtcctcctcctgcaagggatggacgtggaccgacaacaagatcgtcgatggtgccacccctaaggccaactctgccgtcccggccggagttgtattgtaa

SEQ ID NO: 7535 - protein, 370 aa, Claviceps purpurea
MYSLLMLLLPVWTGSFVSAAPAVSRAAALSGADCTFSDVAQAIQKKTSCSTITLRNLKVPAGKTLDLSDLNDGTRVIFTGRTTFEYQEWEGPLIAVSGTNIKVSGSPGNIIDCEGQRWWDGKGTNGQGKKKPDFFNAHDLINSEIRNLNVLNTPAHAFSISHAENLGIFNVNIDDSAGDTQGGHNTDGFDIGNSNGVTISGCSVRNQDDCMAINSGTNITFVNGFCSGGHGLSIGSVGFRSSNTVKGVHIANSKVTKSMYGVRIKTIAGAEGAVSDVVYDNISMSEISDIGIVIQQDYKNGKPTGNPTTGVPITNLTVNKVTGNVKPGGANVHILCGSSSSCKGWTWTDNKIVDGATPKANSAVPAGVVL

SEQ ID NO: 7536 - DNA, 1688 bp, Geotrichum klebahnii
  CDS (143)..(1246)
gatgctctgtttactataaatatctgtgaatcgcctgcaattatttttttttttgataaatcttcaagctcaacaactcttcttctttgaactgataaaaagccttatagactctcttatttgttcactcttaactataacaatgcttttttctaaatctgctatctttgctatggctgctcttgcagttgctgctcctactgaaggtgaccttcaagctcgtggcagcgcctgtgtttttaaggatgccaagtctgctattgctggcaagaagtcttgttcttctatcactcttgagaacattgctgtccccgctggtcaaactcttgatctcactggacttgccaagggcactgttgtcacctttgctggtaccaccacttttggctacaaggagtgggctggtcctttgatctccgtttctggtgattctattactgtcaagcaggcctccggcggtaagattgactgtggtggttctcgttggtgggacggtaagggttccaactctggtggtaagcaaaagcccaagttcttttacgcccacaagctccagaactccaacattcagggactccaagtttacaacacccctgtccaggctttcagcattttgtctgaccatttgactttgtcaaacattctcgttgacaacagagccggtgacaaggctggtggtcacaacaccgacgcttttgatgttggtaccagtacttacatcactatcgaccatgctacggtctacaaccaggacgactgtcttgctatcaactccggtgaccacatcactttccagaacggtttctgctctggtggacatggtctttctattggctccgttggtggccgctctcttaacactgtttccaacgtcaatattcttaacagtcaggttgtcaactctgataacggtgtccgtattaagaccatttctggtgctactggttctgtcagcggtgttaagttccaggacattactctctccaacattgccaagtacggtattgatgttcagcaggactaccgtaacggtggccccactggtaaccccactaacggagtcaagatcactggaatcgagttcatcaacattcacggtagtgtcaagagctctggtaccaacgcttaccttctctgtggttccggctcttgctccaactggacctggagcaagatcaacgtcaagggtggcaaggacagcggtgcttgcaagaacgttccttctggtgctacttgcaaactttaaatagcaactatatatactaccttaaactaagaaacttacattatttttaaacactattaaattttcacaaatttaatacacaaacgttcaatgaagggaaaccgtggacagtaagaatgagttgaaacttgactgaatacttgagttgttattttgtacttgttttagtaagcctaataaggatccatcatttaaggaaaaaaaaataaataataaataaacgttcatttatcttcaaaatgtcatcagtaaagtttcctatcaaaagttgtaaaagactttcatgttaaaaaaatgtttgtcagttatcaagaggtttttctctcaattgtcaagaaaaatgaaaccagacaattattcatattagaatgttcagtaacttaattagttcatgtctgtttttgtagtgcctgtagtgatagtttcttagactttttttgac

SEQ ID NO: 7537 - protein, 367 aa, Geotrichum klebahnii
MLFSKSAIFAMAALAVAAPTEGDLQARGSACVFKDAKSAIAGKKSCSSITLENIAVPAGQTLDLTGLAKGTVVTFAGTTTFGYKEWAGPLISVSGDSITVKQASGGKIDCGGSRWWDGKGSNSGGKQKPKFFYAHKLQNSNIQGLQVYNTPVQAFSILSDHLTLSNILVDNRAGDKAGGHNTDAFDVGTSTYITIDHATVYNQDDCLAINSGDHITFQNGFCSGGHGLSIGSVGGRSLNTVSNVNILNSQVVNSDNGVRIKTISGATGSVSGVKFQDITLSNIAKYGIDVQQDYRNGGPTGNPTNGVKITGIEFINIHGSVKSSGTNAYLLCGSGSCSNWTWSKINVKGGKDSGACKNVPSGATCKL

SEQ ID NO: 7538 - DNA, 1092 bp, Thanatephorus cucumeris
  CDS (1)..(1092)
atgcgtttctcacttggcttcttggccactctcccaatcgcactggtggctgcttctcctgctggaaagcgctgcacaggtacgatctcgtcgctgaacgacgtcgctgctgctcagaagtgcacaactatcaacatcaacgctttcaccgttccggcaggacagacctttgcgatcgctgcgctcgatggaaccaccgtcaacatgctcggggatgtgaagttcggggtcgccaactgggcaggtccgctcttctccatcaccggaaacaaacttgtcttcaacggcaatgggcacaccttagacggtcaaggtgctaagtactgggacggcctgggcagcgccagcggtgtgaccaagcctcacccgatgatgaagatcaagatgtctgggacgtactcgaatgtcaaggtgctcaactcgcccgcgcatgtatacagcgtcagcaaccctgccgcgttggttatgtccaagctcacaatcgataactctgccggtgacaagcccaacagcaagtccggcaccagcgctgctggccacaacactgatggctttgatgtttctaccaccgacctcacaatcgaagacagcaccatcttcaaccaggacgactgcattgccatcaaccagggctccaacatcatcttccagcgcaacacctgcaccggtggccatggtatctctatcggttcggtctccactggcgcgggctgtcaacaacatccagatcttgaacaaacaaggtggtcaacaacgaccaaggcactccgtatcaagaccaagtctgacgctaccaatgcgtcggtgacgaacgtggtgttcaacggcaacactgcaactgggatcaagaagttcggtgtgattgtcgaccagggttaccccaccacgcttggcacccccggcaacaatgtcgccatgtctggcatttctttcgggaccaacaacattgctgttacatcggatgctcagcgggtcgctgtgaactgtgggtcgaagtgcactggcacttgggactggtcgggactgaaggttactggtggtaatgccggcaaggtgtacaactacaagaacatcaaggctggaacctactaa

SEQ ID NO: 7539 - protein, 363 aa, Thanatephorus cucumeris
MRFSLGFLATLPIALVAASPAGKRCTGTISSLNDVAAAQKCTTININAFTVPAGQTFAIAALDGTTVNMLGDVKFGVANWAGPLFSITGNKLVFNGNGHTLDGQGAKYWDGLGSASGVTKPHPMMKIKMSGTYSNVKVLNSPAHVYSVSNPAALVMSKLTIDNSAGDKPNSKSGTSAAGHNTDGFDVSTTDLTIEDSTIFNQDDCIAINQGSNIIFQRNTCTGGHGISIGSVSTGAGCQQHPDLEQTRWSTTTKALRIKTKSDATNASVTNVVFNGNTATGIKKFGVIVDQGYPTTLGTPGNNVAMSGISFGTNNIAVTSDAQRVAVNCGSKCTGTWDWSGLKVTGGNAGKVYNYKNIKAGTY

SEQ ID NO: 7540 - DNA, 1935 bp, Sclerotinia sclerotiorum
  CDS (648)..(1790)
tgctgctgtgtagtatcttttgctcgttcatcctctaataaacctcccccttgatatatgtgatatgatcacaaaagatttggtgacattaggtgtgataaatcatggtgtgctaggtagtgagtgggattgctttctcctggctaaagtttatgatattgattcaaggattgctagagtcaaaatgcgaaccgtgattgtagaaataaagcattaacatgatgaatattttggctcaccgcgggttaagttgttcaggttcaccgctgtcgacatgtgtgggacagaagccgacggtgcgaggatcagtttctactgctaaagtttatgctattgattcaagggtcgctatgatcgaaatgagaaccatggttctagaattgcagcttcaacacagcatcaattctttggctaattgctggtcaggttgcacgggtttaccgttgtcgacttgtggagagctgacggtgcgatttaatggtgtcccactttaaatcttccccaaatttgaatctcgtcttgacatatataagaagcttccaataccgttcttttctttcctcatctcatcatcacttagattcttttccatactgtctagtacattcactctttacattccttaaataacaactctactagccaatatggttgagattctttcctcggccttgagcctccttcggctgggcgcagctgtgtctgccgctccagcaccagcaccaactgctgcaccaaacgttgccgatgctcttgcagcagtcgagaagagggccggttcctgcaccttctccggatccagcggtgccgctgctgccatcaagtccaaggcttcctgcgcaaccatcgtcatcagcgccgtcgctgttccatccggaaccactctcgacttgactggcctcaaatctggtacccacgttgtcttcgagggtactaccaccttcggttacgaagagtggtacggtactctcgtctccgtctccggaactgacatcaccgttaccggtacctccggaagcgttctcgatggtaacggagccaagtactgggatggcaagggtaccaacggtggaaagaccaagccaaagttcttctacgctcactccttgaagggcaagtcctccatcaacaacgtcaagatcttgaactcgccagtccaaggcttctccatcaactctgcctctggtcttactctctctggtatcactatcgacaactctgccggtaactccctcggacacaacactgatgctttcgatgttggatcttccactgatatcaccatctccggcgccaacgttcaaaaccaagatgactgtctcgctatcaactccggtaccggcatcaccttcaccggtggaacctgctccggtggtcacggtctctccatcggatccgtcggtggacgttccgacaacgttgtctctgatgttatcattgaatcctccaccgtcaagaactccgccaacggtgtccgcatcaagactgtttccggtgccactggatccgtctccggcgttacctacaaggacatcaccctctccggtattaccagctacggtgttgtcatcgagcaagattacgagaacggttccccaactggaaagccaacctccggtgttcccatcactggtgtcactctctccaacgttcacggtaccgtctcttcctccgctaccaacgtttacgttctctgcgccaagtgctctggctggacctgggatgttaacgttactggtggtaagacctccaccaagtgcgctggtctcccatctggtgtcaagtgttaaatactttaacacggctactttcaagcactggattccactaggaaatcaattgtagagggggaatggggagaaaggggttcgagccgggctgcacccagttgtcaattctttgtacatatagcttctctggttcacacatagactg

SEQ ID NO: 7541 - protein, 380 aa, Sclerotinia sclerotiorum
MVEILSSALSLLRLGAAVSAAPAPAPTAAPNVADALAAVEKRAGSCTFSGSSGAAAAIKSKASCATIVISAVAVPSGTTLDLTGLKSGTHVVFEGTTTFGYEEWYGTLVSVSGTDITVTGTSGSVLDGNGAKYWDGKGTNGGKTKPKFFYAHSLKGKSSINNVKILNSPVQGFSINSASGLTLSGITIDNSAGNSLGHNTDAFDVGSSTDITISGANVQNQDDCLAINSGTGITFTGGTCSGGHGLSIGSVGGRSDNVVSDVIIESSTVKNSANGVRIKTVSGATGSVSGVTYKDITLSGITSYGVVIEQDYENGSPTGKPTSGVPITGVTLSNVHGTVSSSATNVYVLCAKCSGWTWDVNVTGGKTSTKCAGLPSGVKC

SEQ ID NO: 7542 - DNA, 1095 bp, Emericella nidulans
  CDS (1)..(1095)
atgcatttccttcaaaactcccttattgctgcggcaatgggcgctgcgctggtcgctgccgcccctgctgctgatcttgatgctcgaagctcgtgcaccttcacctctgcctctgcggccaagtctggcgcatccaagtgctccactgtcaccctcaagagcatccaagttcctgccggtgagacccttgacctgaccggtctcaaatcgggtgctactgttatctttgaaggcgagacaacctttggctacaaagaatggaaaggaccgctgatctccatgtccggtgacaaaatcacggttaagcaagcctctggcgcaaagatcaactgcgacggggcccgctggtgggacaccaagggcagcaacggcggcaagaccaagcccaagttcttcagcgcgcataagctgaacaactccaagattcaggggctgaagatctacaacacccctgtccagggattcagtatccagtccgaccacctgaccatttcggacgtgaccatcgacaactccgccggcaccagcaagggccacaacaccgatgcctttgacatcggctcctcgacgtacattaccatcgacggtgcgactgtctacaaccaggatgactgtattgccattaactccggcgagcacatcaccttcaccaacggatactgttccggcggccatggcttgtctattggctccgtcggcggccgcagcgacaacaccgtcaagagcgtcaccatctccaacagcaaggtcgtcgactcccaaaacggcgtccgcatcaagaccgtctacaaggctaccggctccgtcaccgatgtcaccttccaggacatcgaactctctggaatcaccaagtacggcctcattgttgagcaggactatgagaatggtagcccaacaggtacccctaccaacggtgtcgaggttgaagatatcaccttcaagaagattaccggctctgtggatagcagtgccacacgtgtcaatatcctctgcgggtcagggagctgcaaagactggacttggtctggggttgatattaccggcggaaagaagagctctaagtgcaagaatgttccgtctggtgcttcgtgctag

SEQ ID NO: 7543 - protein, 364 aa, Emericella nidulans
MHFLQNSLIAAAMGAALVAAAPAADLDARSSCTFTSASAAKSGASKCSTVTLKSIQVPAGETLDLTGLKSGATVIFEGETTFGYKEWKGPLISMSGDKITVKQASGAKINCDGARWWDTKGSNGGKTKPKFFSAHKLNNSKIQGLKIYNTPVQGFSIQSDHLTISDVTIDNSAGTSKGHNTDAFDIGSSTYITIDGATVYNQDDCIAINSGEHITFTNGYCSGGHGLSIGSVGGRSDNTVKSVTISNSKVVDSQNGVRIKTVYKATGSVTDVTFQDIELSGITKYGLIVEQDYENGSPTGTPTNGVEVEDITFKKITGSVDSSATRVNILCGSGSCKDWTWSGVDITGGKKSSKCKNVPSGASC

SEQ ID NO: 7544 - DNA, 1104 bp, Aspergillus oryzae
  CDS (1)..(1104)
atgcatttccaacttctcggcctcgccgccctcggctctctcgccgctgctgctcccgccccttctcgcacctctgaactggttgagagaggctcttcttgcactttcacctccgctgctcaggcctctgcgagcgccaagagctgctccaacatcgtcctcaagaacatcgctgtccctgctggagagactcttgacctgtccaaggccaaggacggtgccaccatcaccttcgagggcaccaccaccttcggctacaaggaatggaagggacccctgatccgtttcggtggtaacaaaatcaccgtcacccaggccgccggcgctgtcattgacggccagggctcccgctggtgggacggcaagggcaccaacggtggcaagaccaagcccaagttcatctacgcccacaagctccagtcctcgaccatcaagggtttgcacgttaagaactcccccgtccaggtcttcagcgtccagggtaacgacgtccacctgaccgacatcaccatcgacaactcggatggtgacaacaatggtggtcacaacaccgatgctttcgacgttagcgagagtaacggtgtctacatcaccggtgccaatgtcaagaaccaggatgactgcctggccatcaactctggtgagaacatcgaattcaccggcgctacctgctccggcggtcacggtatctccatcggttccatcggtaaccgcgacagcaacaccgtcaagaacgtcaaggttgccgactccaccgtcgtcgactccgacaacggtatccgtatcaagaccatctctggtgctaccggctctgtcagcggcgtgacctacgagaacatcaccctcaagaacatcaagaagaacggtatcgtcatcgagcaggactacaagaacggtggccccaccggcaagcccaccaccggtgtccccatcactgacctcactgtcaacggtgtcactggctccgttgccagcaaggccacccccgtctacatcctctgcggcaagggcagctgctctgactggacctggaagggtgtcagcatctccggtggcaagaagtctgataagtgccagaacattccttctggcgcttcttgctaa

SEQ ID NO: 7545 - protein, 367 aa, Aspergillus oryzae
MHFQLLGLAALGSLAAAAPAPSRTSELVERGSSCTFTSAAQASASAKSCSNIVLKNIAVPAGETLDLSKAKDGATITFEGTTTFGYKEWKGPLIRFGGNKITVTQAAGAVIDGQGSRWWDGKGTNGGKTKPKFIYAHKLQSSTIKGLHVKNSPVQVFSVQGNDVHLTDITIDNSDGDNNGGHNTDAFDVSESNGVYITGANVKNQDDCLAINSGENIEFTGATCSGGHGISIGSIGNRDSNTVKNVKVADSTVVDSDNGIRIKTISGATGSVSGVTYENITLKNIKKNGIVIEQDYKNGGPTGKPTTGVPITDLTVNGVTGSVASKATPVYILCGKGSCSDWTWKGVSISGGKKSDKCQNIPSGASC

SEQ ID NO: 7546 - DNA, 1657 bp, Brassica napus
  CDS (145)..(1446)
ggcatcacgagggtacccgtaaatcccaccatacaacaaagttctgtgaaagtctcccaaaaactgcaaagagtctcatattagttcttactctcagaaataaaacacactctttctgaaaagattagcgtttcaaaccccgaaatggcccgttgtcatggaagtcttgctattttcttatgcgttcttttgatgctcgcttgctgccaagctttgagtagcaacgtagatgatggatatggtcatgaagatggaagcttcgaaaccgatagtttaatcaagctcaacaacgacgacgacgttcttaccttgaaaagctccgatagacccactaccgaatcatcaactgttagtgtttcgaacttcggagcaaaaggtgatggaaaaaccgatgatactcaggctttcaagaaagcatggaagaaggcatgttcaacaaatggagtgactactttcttgattcctaaagggaagacttatctccttaagtctattagattcagaggcccatgcaaatcattacgtagcttccagatcctaggcactttatcagcttctacaaaacgatcggattacagtaatgacaagaaccactggcttattttggaggacgttaataatctatcaatcgatggcggctcggcggggattgttgatggcaacggaaaaatctggtggcaaaactcatgcaaaatcgacaaatctaagccatgcacaaaagcgccaacggctcttactctctacaacctaaacaatttgaatgtgaagaatctgagagtgagaaatgcacagcagattcagatttcgattgagaaatgcaacagtgttgatgttaagaatgttaagatcactgctcctggcgatagtcccaacacggatggtattcatatcgttgctactaaaaacattcgaatctccaattcagacattgggacaggtgatgattgcatatccattgaggatggatcgcaaaatgttcaaatcaatgatttaacttgcggccccggtcatggcatcagcattggaagcttgggggatgacaattccaaagcttatgtatcgggaattaatgtggatggtgctacgctctctgagactgacaatggagtaagaatcaagacttaccagggagggtcaggaactgctaagaacattaaattccaaaacattcgtatggataatgtcaagaatccgatcataatcgaccagaactactgcgacaaggacaaatgcgaacaacaagaatctgcggttcaagtgaacaatgtcgtgtatcggaacatacaaggtacgagcgcaacggatgtggcgataatgtttaattgcagtgtgaaatatccatgccaaggtattgtgcttgagaatgtgaacatcaaaggaggaaaagcttcttgcaaaaatgtcaatgttaaggataaaggcaccgtttctcctaaatgcccttaattactaagttgattatgtaatatacataaatacgtattatatgtggttatagatgccatctatatccttatctacgtattgattctcgatatatatagaaaactaaggatttatgggaatatacatacaatagttgagataattgttgtcttgtatatggttcactgaagttgattgcttgtccacgaataaatgaataatgtcatttgtc

SEQ ID NO: 7547 - protein, 433 aa, Brassica napus
MARCHGSLAIFLCVLLMLACCQALSSNVDDGYGHEDGSFETDSLIKLNNDDDVLTLKSSDRPTTESSTVSVSNFGAKGDGKTDDTQAFKKAWKKACSTNGVTTFLIPKGKTYLLKSIRFRGPCKSLRSFQILGTLSASTKRSDYSNDKNHWLILEDVNNLSIDGGSAGIVDGNGKIWWQNSCKIDKSKPCTKAPTALTLYNLNNLNVKNLRVRNAQQIQISIEKCNSVDVKNVKITAPGDSPNTDGIHIVATKNIRISNSDIGTGDDCISIEDGSQNVQINDLTCGPGHGISIGSLGDDNSKAYVSGINVDGATLSETDNGVRIKTYQGGSGTAKNIKFQNIRMDNVKNPIIIDQNYCDKDKCEQQESAVQVNNVVYRNIQGTSATDVAIMFNCSVKYPCQGIVLENVNIKGGKASCKNVNVKDKGTVSPKCP

SEQ ID NO: 7548 - DNA, 1149 bp, Botrytis cinerea
  CDS (1)..(1149)
atggttcaacttctctcaatggcctccggcctccttgcgctgagcgcaatcgtctctgctgctccagcaccagcaccaaccgcagctccaaacccagccgatgctcttgccgctatcgagcaacgtgctgccgcctgtaccttctcgggatctggtggtgctgccgccgcttccaagtccaagacttcctgcgccaccatcgtcctcagcgcactctccgtcccatccggtactacccttgacttgactggcctcaagtccggcacccatgtcgtcttcgagggtaccaccaccttcggctacgaagaatggtccggtcctctcttctccgtctccggaactgacattactgtcaccggtgcctccggcagcaagcttgatggccaaggagccaagtactgggatggaaagggaaccaacggtggaaagaccaagccaaagttcttttacgcccactccttgaagggtaaatcaacaatctctggtatcaacatcttgaactctccagttcaagtcttctccatcaacggtgcttccggtcttactctctccaacatccacattgacaactctgctggagatgctggtaaacttggccacaacaccgatgctttcgatgttggttcctccagcgatatcaccatctctggtgccaacgttcaaaaccaagatgactgtctcgctatcaactccggtactggtattaccttcaccggtggaacctgttccggtggtcacggtctctctatcggatctgtcggtggacgttccgacaacactgtctccgatatcatcattgaatcatctactgtcaagaactctgccaacggtgtccgtatcaagactgtctccggtgccactggatccgtctccggcgttacctacaaggacatcaccctctccggcattacatcctacggtgttgtcgttcaacaagattacaagaacggttccccaaccggaaagccaacctccggtgtccccatcactgatgtcactttctccaacgtcaagggtaccgtctcctccagtgctaccaacgtctacgttctttgcgccaagtgctctggctggtcttgggatgtcagtgttagcggtggtaagacctccagcaagtgtgctggtctcccatctggtgtcaagtgttaa

SEQ ID NO: 7549 - protein, 382 aa, Botrytis cinerea
MVQLLSMASGLLALSAIVSAAPAPAPTAAPNPADALAAIEQRAAACTFSGSGGAAAASKSKTSCATIVLSALSVPSGTTLDLTGLKSGTHVVFEGTTTFGYEEWSGPLFSVSGTDITVTGASGSKLDGQGAKYWDGKGTNGGKTKPKFFYAHSLKGKSTISGINILNSPVQVFSINGASGLTLSNIHIDNSAGDAGKLGHNTDAFDVGSSSDITISGANVQNQDDCLAINSGTGITFTGGTCSGGHGLSIGSVGGRSDNTVSDIIIESSTVKNSANGVRIKTVSGATGSVSGVTYKDITLSGITSYGVVVQQDYKNGSPTGKPTSGVPITDVTFSNVKGTVSSSATNVYVLCAKCSGWSWDVSVSGGKTSSKCAGLPSGVKC

SEQ ID NO: 7550 - DNA, 1125 bp, Gibberella fujikuroi
  CDS (1)..(1125)
atggttcgaaacatcgctatcgcggccttgctcccagctgcctgggctctgccgtcaagctctctccaggaacgagatgcttgcaccgtgactgactactccggcctcgccaccgccgtctcatcctgcacaaacatcgtgctcgccggctttcaagtcccggcaggcaagcaacttgatctatccaagctcaaggctggcacaaccgtcactttcaagggcaagaccacttttgccaccactgctgacaacgactttgatcctatcgtcatcagtgggagtggtatcaccataactggtgcatctggtcatgtcattgacggcaacggtcaagcgtactgggacggcgaaggttccaacaacaaggacaaccccaagcctgaccacttcatcgttgtcaagaagaccaccggcaactcaaagatcacaaacctcaacatccagaactggcccgttcactgcttcgacatcaccggcagttcacaattaaccatctcagggctaattcttgacaacagagccggtgacaagccaaatgccaagagcggtagcttgcccgctgcgcataacagcgacggtttcgacatttcgtccagcgaccacgtcactctggataataaccatgtttataaccaggatgattgcgttgccgtcacttctggtaccaacatcgttgtttcaaacatgtattgctccggcggtcatggccttagtatcggatctgttggtggaaagagcgacaatgtcgtcgatggtgttcagttcttgaactcgcagattgtgaacagtgagaatggatgtcgcatcaagtccaactctggaacaactggcacgatcaacaacgttacctaccagaacattgctcttaccaacatcagcaaatacggtgtcgatgtccagcaagattatctcaacggcggtcctactggaaagcccaccaacggagtcaagatcagcaatatcaagttcaccaaggttactggaaccgtagccagctcagctcagaactggtatattctgtgcggtgatggtagctgctctggatttaccttttcaggaaacgctatcaccggcggcggcaagactagcagctgcaactatcctagcaacacttgccccagctag

SEQ ID NO: 7551 - protein, 374 aa, Gibberella fujikuroi
MVRNIAIAALLPAAWALPSSSLQERDACTVTDYSGLATAVSSCTNIVLAGFQVPAGKQLDLSKLKAGTTVTFKGKTTFATTADNDFDPIVISGSGITITGASGHVIDGNGQAYWDGEGSNNKDNPKPDHFIVVKKTTGNSKITNLNIQNWPVHCFDITGSSQLTISGLILDNRAGDKPNAKSGSLPAAHNSDGFDISSSDHVTLDNNHVYNQDDCVAVTSGTNIVVSNMYCSGGHGLSIGSVGGKSDNVVDGVQFLNSQIVNSENGCRIKSNSGTTGTINNVTYQNIALTNISKYGVDVQQDYLNGGPTGKPTNGVKISNIKFTKVTGTVASSAQNWYILCGDGSCSGFTFSGNAITGGGKTSSCNYPSNTCPS

SEQ ID NO: 7552 - DNA, 1089 bp, Kluyveromyces marxianus
  CDS (1)..(1089)
atgttattcagcaacaccttattgatcgcagcagctagtgcattattagctgaagcttctccattggaaaagagagacagttgtaccttgagtgggaagacagccggaggtggtttgtccaactgtgccacggtcactgtcaacaacgtcgaagtcccatctggtaagactttggacttgacaggcttgcaagacggtgcgacagttaatttcgtcgggcaggttacctttgattacgatgaatgggtgggtccattggtctccatctccggtaacaacatcaaggtggtaggtaaatctggccacttgttagatggtgatggtgcacgttggtgggacgggaagggtgacagtggtaaaaaggtgaagcctaagttcatgagcttgaaattgactggcaactcagatgtcggtgggttgcaaatcaagaataccccaattcaagctatctcagtgaactcttgtagtgacactgtaattcacgatgtcaccattgacaacagtgatggtgacaaggacagcttgggtcacaacactgacggtttcgatgttggtagcgttaacaacgtcaccattgagaactgtcatgtctacaaccaagatgactgtatcgccgtcaactccggtaccggtgtctacttcaagaacaactactgttctggtggtcatggtgcttccattggttcagtcggtcttcgctcaaacaatgtggttgacaccgtttacttcgagaacaaccaaattgtcaactctgacaacggtttgagaattaagaccattcaaaaggccactggttccgtcaacaacgtgcacttcttgtccaacactatctccggcatcagaaagttcggaattgttgttgaaactgattacagcaatggatccaccaccggtaccccaggtagcaaggtcccaatcaccaacttcgaagtcgatggtttgactggttcagttgactcttccgcttacagagtcaagatcttggttgctggtgcttctaagtggacttggaaggatgttgatatcactggtggttgttctttcggttcatgtactggtattccatctggtagcggagccttctgttaa

SEQ ID NO: 7553 - protein, 362 aa, Kluyveromyces marxianus
MLFSNTLLIAAASALLAEASPLEKRDSCTLSGKTAGGGLSNCATVTVNNVEVPSGKTLDLTGLQDGATVNFVGQVTFDYDEWVGPLVSISGNNIKVVGKSGHLLDGDGARWWDGKGDSGKKVKPKFMSLKLTGNSDVGGLQIKNTPIQAISVNSCSDTVIHDVTIDNSDGDKDSLGHNTDGFDVGSVNNVTIENCHVYNQDDCIAVNSGTGVYFKNNYCSGGHGASIGSVGLRSNNVVDTVYFENNQIVNSDNGLRIKTIQKATGSVNNVHFLSNTISGIRKFGIVVETDYSNGSTTGTPGSKVPITNFEVDGLTGSVDSSAYRVKILVAGASKWTWKDVDITGGCSFGSCTGIPSGSGAFC

SEQ ID NO: 7554 - DNA, 1218 bp, Oryza sativa
  CDS (1)..(1218)
atggcctccactgtgctcattgtctctgcatctctccttgcactcttcttcttcttgcatagtgctgatgcagatgttggcagtaatgtgttcagcatacagagctacggggctcatggagacggacgacatgatgacaccaaagcattgggagatacatgggctgcagcttgctcctctgcaaaacctgcagttttgctcatccccaagggcaagaaatacctgatcaagcacacaacactgtctggtccatgcaaatcaagcatctcattgatggtgaagggtagtttggtggcttctccagagaggtcagactggagcaaggagaccataaggcactggattctgatcagtggtgtcactggtcttactgtcactggtggtgggaccatagatggaaatggcaagatttggtggcaaaattcatgcaaaaccaactcaaagcttccatgcacagaagctccaacggcactgacattctactcctgcaagaatctgaaggtagagtatctgaaggtggtgaacagccagcaaatccagatttcagtggaggattgcaccgatgtgatggtgtctcgcctgtcgatcacagcaccagaaacagccccaaacactgatggaatccatatcacacgcagcagagatgttgaggtgacagactgcatgatcaagaccggggatgactgcatgtcaatcgaggacggaaccgagaacctgcatgtcaagaacatggtgtgtggaccgggacacggcatcagcatcggtagcttgggtgatcataattctgaagctcatgtcaacaatgtcaccgtcgacaatgtcaggttgtatggcacagccaacggagctcgcatcaagacatggcagggaggaaagggttcagcgaagaacatcgtgttccagaacatggtcatggacaatgtctggaaccccatcatcatcgaccaaaactactgcgactcttctacaccctgcaagcaacagaaatctgcagtggaggtgagcaatgtgctgttcaagaacatcaggggcacaagtgcatcagaggaggccatcatgctgcattgcagcagcagtgtaccttgccatggcataaccttggagaatgtcaatctcactgtcaagggaggtagcagtaatgccaagagcacctgccagaacgcagaatggaagaaatccgggagtgtcagtccacagccatgtggtttcaggaactga

SEQ ID NO: 7555 - protein, 405 aa, Oryza sativa
MASTVLIVSASLLALFFFLHSADADVGSNVFSIQSYGAHGDGRHDDTKALGDTWAAACSSAKPAVLLIPKGKKYLIKHTTLSGPCKSSISLMVKGSLVASPERSDWSKETIRHWILISGVTGLTVTGGGTIDGNGKIWWQNSCKTNSKLPCTEAPTALTFYSCKNLKVEYLKVVNSQQIQISVEDCTDVMVSRLSITAPETAPNTDGIHITRSRDVEVTDCMIKTGDDCMSIEDGTENLHVKNMVCGPGHGISIGSLGDHNSEAHVNNVTVDNVRLYGTANGARIKTWQGGKGSAKNIVFQNMVMDNVWNPIIIDQNYCDSSTPCKQQKSAVEVSNVLFKNIRGTSASEEAIMLHCSSSVPCHGITLENVNLTVKGGSSNAKSTCQNAEWKKSGSVSPQPCGFRN

SEQ ID NO: 7556 - DNA, 1269 bp, Oryza sativa
  CDS (1)..(1269)
atggcttgcaatgtgctcattttctctgcatatgtcgtcgtcatgtcgttcttcttgtgtagtgttcatgccaaggtcaacatgaatgcatcattccatttaactagtggagatgatagtctcagaggcaggtctcttgagtcaaagaaggtggtgttcgatgtgcgcaaacatggcgcttacggagatggacaacatgatgacacgaaggcattggcaaaggcatgggctgcagcttgctcctcttcgcaaccttccattgttctcatcccaaagggcaagagatacctcaccaagcacattacactatctggtccatgcaaatcaagcatcacgttcatgatagagggtacgttggtggctcctccaaagaggtcagattggagcaaggaaactattaggcactggattatgttcaatggtgtgagtggccttactgtcgctggtggtgggactgtcgatgaaaacggcaagatttggtggcaaaattcctgcaaaacgaatgcaaaacttccatgcactgaagctccaacggccttgacattctactcctgttcaaatctgaaagtggagaacttgaagctactaaacagccaacaaatccacatgtcagttgaggattgcactgatgttaggatctctagcctgacaatcacagcaccaggcactagcccaaacaccgacggcatccatatcacaagaagtaaaaatgtacaagtgacaggctgcataatcaagaccggggatgactgcatgtcgattgaggatggaactgagaacttacatgtcaagaacatggtgtgtggaccgggacacggcatcagcatcgggagcttaggcgatcacaactctgaagctcatgtcaacaatgtcaccgtcgacaccgtcaggctatatggcacaaccaacggagctcgcatcaagacatggcagggcggttggggctacgcgaagaacatcgtgttccagaacatgatcatggaaaatgtttggaacccaatcattatcgaccagaactactgtgattctgctacaccctgcaaggaacagacatctgcggtgcaagttagcaatgtggtcttcaagaacatcaggggcacaagtgcttccaaggaggctatcaaactggactgtagcagaaatgtaccttgtcaaggaataaccttgaaggacgtcaagctcactatcaagggaggtggtagtgatgccaagagcacttgcggaaacgcaaaatggaagaaatcagggatagccctgtgctttcagtaa

SEQ ID NO: 7557 - protein, 422 aa, Oryza sativa
MACNVLIFSAYVVVMSFFLCSVHAKVNMNASFHLTSGDDSLRGRSLESKKVVFDVRKHGAYGDGQHDDTKALAKAWAAACSSSQPSIVLIPKGKRYLTKHITLSGPCKSSITFMIEGTLVAPPKRSDWSKETIRHWIMFNGVSGLTVAGGGTVDENGKIWWQNSCKTNAKLPCTEAPTALTFYSCSNLKVENLKLLNSQQIHMSVEDCTDVRISSLTITAPGTSPNTDGIHITRSKNVQVTGCIIKTGDDCMSIEDGTENLHVKNMVCGPGHGISIGSLGDHNSEAHVNNVTVDTVRLYGTTNGARIKTWQGGWGYAKNIVFQNMIMENVWNPIIIDQNYCDSATPCKEQTSAVQVSNVVFKNIRGTSASKEAIKLDCSRNVPCQGITLKDVKLTIKGGGSDAKSTCGNAKWKKSGIALCFQ

SEQ ID NO: 7558 - DNA, 1340 bp, Sclerotinia sclerotiorum
  CDS (1)..(1143)
atggttgagattctttcctcggccttgagcctccttgcgctgggcgcagctgtgtctgccgctccagcaccagcaccaactgctgcaccaaacgttgccgatgctcttgcagcagtcgagaagagggccggttcctgcaccttctccggatccagcggtgccgctgctgccatcaagtccaaggcttcctgcgcaaccatcgtcatcagcgccgtcgccgttccatccggaaccaccctcgacttgactggcctcaaatctggtacccacgttgtcttcgagggtactaccaccttcggttacgaagagtggtccggtcctctcgtctccgtctccggaactgacatcactgttaccggtgcctccggaagcgttctcgatggtaacggagccaagtactgggatggcaagggtaccaacggtggaaagaccaagccaaagttcttctacgctcactccttgaagggcaagtcctccatcaacaacgtcaagatcttgaactccccagtccaagttttctccatcaactctgcctctggtcttactctctctggtatcactatcgacaactctgccggtaactccctcggacacaacactgatgctttcgatgttggatcttccactgatatcaccatctccggcgccaacgttcaaaaccaagatgactgtctcgctatcaactccggtaccggcatcaccttcaccggtggaacctgctccggtggtcacggtctctccatcggatccgtcggtggacgttccgacaacgttgtctctgatgttatcattgaatcctccaccatcaagaactccgccaacggtgtccgcatcaagactgtttccggtgccactggatccgtctccggcgttacctacaaggacatcaccctctccggtattaccaagtacggtgttgtcatcgagcaagattacgagaacggttccccaactggaaagccaacctccggtgttcccatcactggtgtcactctctccaacgttcacggtaccgtctcttcctccgctaccaacgtttacgttctctgcgccaagtgctctggctggacctgggatgttaacgttactggtggtaagacctccaccaagtgcgctggtctcccatctggtgtcaagtgttaaatactttaacacggctactttcaagcactggattccactaggaaatcaattgtagagggggaatggggagaaaggggttcgagccggctgcacccagttgtcaattctttgtacatatagcttctcttgtcacacatagactgtttaaacacttgtaatcgaattgatttgattaccaccaaaaaaaaaaaaaaaaa

SEQ ID NO: 7559 - protein, 380 aa, Sclerotinia sclerotiorum
MVEILSSALSLLALGAAVSAAPAPAPTAAPNVADALAAVEKRAGSCTFSGSSGAAAAIKSKASCATIVISAVAVPSGTTLDLTGLKSGTHVVFEGTTTFGYEEWSGPLVSVSGTDITVTGASGSVLDGNGAKYWDGKGTNGGKTKPKFFYAHSLKGKSSINNVKILNSPVQVFSINSASGLTLSGITIDNSAGNSLGHNTDAFDVGSSTDITISGANVQNQDDCLAINSGTGITFTGGTCSGGHGLSIGSVGGRSDNVVSDVIIESSTIKNSANGVRIKTVSGATGSVSGVTYKDITLSGITKYGVVIEQDYENGSPTGKPTSGVPITGVTLSNVHGTVSSSATNVYVLCAKCSGWTWDVNVTGGKTSTKCAGLPSGVKC

SEQ ID NO: 7560 - DNA, 1364 bp, Arabidopsis thaliana
  CDS (50)..(1351)
  misc_feature (618)..(618): n is a, g, c or t
cgacagcattccttttccagcaacaaagaaaaaacacatttccttgccaatggcccgttgtaccaaccttgttaccgttttcctattatgggctcttttgatgctctcatggtgtaaagcttcaagaatcagccctaatgtatatgaccattcttataaaaggttcaaatccgatagcttaatcaagcgaagagaggacatcacgggattgagaagttttgtaagagcctctttgcggactccaaccaccgttagtgtttctgattttggagctaaaggagatggaaaaaccgatgacacgcaggcgttcgtgaatgcgtggaagaaagcatgttcttcaaatggagctgttaatctcctagttcctaaagggaatacttatctccttaagtctattcaattaactggtccatgcaattctattctcaccgttcagatattcggtacgttatccgcatctcaaaaacgatcggattacaaagatatcagcaaatggataatgtttgatggcgttaacaatctatcagtcgatggaggcgacactggggttgtggacggaaacggcgaaacgtggtggcaaaactcatgcaaacggaacaaagctaagccatgcacaanagccccaacggctcttactttttacaactcgaaaagtctgatagtgaagaatctgaaggtgagaaatgcacagcagatccagatttcgattgaaaaatgctccaacgttcaggtctctaatgtcgtggtaactgcgcctgcggatagtcctaacaccgatggtattcatatcactaacacccaaaacattcgagtctccgaatccatcattggaacaggcgatgattgcatatctattgaaagtggatcacaaaatgttcaaatcaatgatataacttgcggtcccggtcacggtatcagtattgggagccttggagatgacaattcaaaggcttttgtctcaggcgtgactgtggatggtgctaagctttccggtacagacaatggagtaagaatcaaaacttaccagggagggtcaggaactgctagcaatattatatttcaaaacattcagatggataatgttaagaatccgatcataatcgaccaagacgactgcgacaagggcaaatgcactacagagaaatccgcggtccaagtgaagaacgtggtgtaccgggacataagtggcactagcgcatcggaaaacgcaataacgtttaactgcagcaagaactatccatgccaaggaattgtgcttgacagagtgaacattaaaggaggaaaagcaacttgcaccaatgctaatgtggttgataaaggagctgttctgcctcagtgcaactccacttagttacttagatcgc

SEQ ID NO: 7561 - protein, 433 aa, Arabidopsis thaliana
  misc_feature (190)..(190): The Xaa at location 190 stands for Arg, Ile, Lys, or Thr.
MARCTNLVTVFLLWALLMLSWCKASRISPNVYDHSYKRFKSDSLIKRREDITGLRSFVRASLRTPTTVSVSDFGAKGDGKTDDTQAFVNAWKKACSSNGAVNLLVPKGNTYLLKSIQLTGPCNSILTVQIFGTLSASQKRSDYKDISKWIMFDGVNNLSVDGGDTGVVDGNGETWWQNSCKRNKAKPCTXAPTALTFYNSKSLIVKNLKVRNAQQIQISIEKCSNVQVSNVVVTAPADSPNTDGIHITNTQNIRVSESIIGTGDDCISIESGSQNVQINDITCGPGHGISIGSLGDDNSKAFVSGVTVDGAKLSGTDNGVRIKTYQGGSGTASNIIFQNIQMDNVKNPIIIDQDDCDKGKCTTEKSAVQVKNVVYRDISGTSASENAITFNCSKNYPCQGIVLDRVNIKGGKATCTNANVVDKGAVLPQCNST

SEQ ID NO: 7562 - DNA, 1086 bp, Kluyveromyces wickerhamii
  CDS (1)..(1086)
atgttgttcaataaaaaccttatcatcctttcttctgcaattttaacttccgcctctcctttggagaaaagagattcctgtactttgactggtagcaccacaggcgggtccggggtgaatggctgttcagcagttattgtcaaagatgttagcgttccagcaggtaaaactttggacttaacaggtctaaagagcggagcaaccgtcactttcgaaggtaccacctcttttggctatcaagagtgggaaggtcctttgatttcaattgctggttccggcattactgtaactggtgcaagtgggaatttaatcgatggtgacggtgctcgttggtgggatggtaaaggcgataatggcaagacaaagccgaaattactgaaactaaagttaaccggtgattcagtagtttctggattgaagattaagaactcccctagacaggttgtttctgtgaatcagtgcagtgacttgacaatccatgacattacgatcgacaataccgatggtgatggcagcggcaaaggccacaatactgatggtttcgatgtgggtagcagtgacactgtcacaatcaagaactgtaaggtttacaatcaagatgattgtatcgcagttaattctggtaaaaacatatatttccagaataattactgttcaggtggccatgggatttccatcggatcagtaggagatcgttccgataatgtggttgactctgtttggttcgaaaacaaccaagttgtggactcagataacggtttgagaatcaaaactgttcaagatgcaaccggtaaagtgaacaacgttcatttcttggataacgaaatctctaacattgcaaaatacggtattgttgtggaatccgattataaggacggctctactactggcaccccaggtagcggtgttccaatcacgaaccttgaaatcaatggtgttacaggttcggtggcatcctctgccaagagagtcaagattcttgttgccggagcttcttcgtggaagtggtcgaatatcaagttcaccggaggccagtcttacagctcctgcgagggtattccatccggtagcggtgcttcatgctaa

SEQ ID NO: 7563 - protein, 361 aa, Kluyveromyces wickerhamii
MLFNKNLIILSSAILTSASPLEKRDSCTLTGSTTGGSGVNGCSAVIVKDVSVPAGKTLDLTGLKSGATVTFEGTTSFGYQEWEGPLISIAGSGITVTGASGNLIDGDGARWWDGKGDNGKTKPKLLKLKLTGDSVVSGLKIKNSPRQVVSVNQCSDLTIHDITIDNTDGDGSGKGHNTDGFDVGSSDTVTIKNCKVYNQDDCIAVNSGKNIYFQNNYCSGGHGISIGSVGDRSDNVVDSVWFENNQVVDSDNGLRIKTVQDATGKVNNVHFLDNEISNIAKYGIVVESDYKDGSTTGTPGSGVPITNLEINGVTGSVASSAKRVKILVAGASSWKWSNIKFTGGQSYSSCEGIPSGSGASC

SEQ ID NO: 7564 - DNA, 1140 bp, Alternaria citri
  CDS (1)..(1140)
atggttgccttaactcttggtatcttcttcacgtcgctggcggcgtctgctgttgcagctccagcccctgccatcactcctgcacccaagcccgaggtcgtgaagcgtgcctccagctgcactttttcaggctccaacggagctgctgaggcttccaagtcacagtcatcatgtgctaccatggttctttccgacgttgccgtcccttcaggcacaactttggacctctctagtctggctgacggtactactgtcatcttcgagggtaccaccacctggggctactcggaatggaagggtccccttcttgacatccaaggaaagaagatcactgtcaagggcgccgagggatctgttctcaacggtgatggtgctcgttggtgggacggtaagggtggaaatggcggaaagaccaagcccaagttcttctccgctcacaaactgaccgactccaccatcaccggcattaccatcaagaaccctcccgtccaagtcgttagtatcaacggctgcgatggtcttaccattacagacatgactattgatgcgtccgacggcgacaaggacgagcagggccacaacacagatggtttcgatattggctccagcaacaacgtcatcattgatggcgctaaggtttacaaccaggatgattgcgtagctgtcaactcaggtaccgaaatcaccttcaagaacggcctctgctccggtggacacggtctatccattggctcggttggtggtcgtgacgataacactgtcgacactgtcaccttctccaattccgaggtcaccaagtctgtcaacggtgtccgcgtcaaggctaaggttggcacaaccggcaagattaacaaagtcacctacgacgatattactctgtctgagatttccaagtacggcgttcttattgagcagaactactatggcggtgaccttcacggtgacgcggacactggtgtccccatcaccgccttgacacttgacaacgtcactggtggtgtttccagcagtggctacgacgtcgttgtcacctgtggcaaaggctcttgcacaggctggacctggaccggtgtcgacgttactggtggtaagacctatgacaagtgctccaacgtgcccagcgttaccaagtgttcgtaa

SEQ ID NO: 7565 - protein, 379 aa, Alternaria citri
MVALTLGIFFTSLAASAVAAPAPAITPAPKPEVVKRASSCTFSGSNGAAEASKSQSSCATMVLSDVAVPSGTTLDLSSLADGTTVIFEGTTTWGYSEWKGPLLDIQGKKITVKGAEGSVLNGDGARWWDGKGGNGGKTKPKFFSAHKLTDSTITGITIKNPPVQVVSINGCDGLTITDMTIDASDGDKDEQGHNTDGFDIGSSNNVIIDGAKVYNQDDCVAVNSGTEITFKNGLCSGGHGLSIGSVGGRDDNTVDTVTFSNSEVTKSVNGVRVKAKVGTTGKINKVTYDDITLSEISKYGVLIEQNYYGGDLHGDADTGVPITALTLDNVTGGVSSSGYDVVVTCGKGSCTGWTWTGVDVTGGKTYDKCSNVPSVTKCS

SEQ ID NO: 7566 - DNA, 1765 bp, Brassica napus
  CDS (73)..(1377)
gttttcaacataatcccaaaaaacgacacgcgttccttttccaaaaattcacttctctacgtaccaaccacaatggctcattgttgcacagttcttaccggtttactagtatggtctctttttatgctctcatggtgtgaagcttcaagaaacaacattaatagatatgatcattcttatggaacgttcaaatccaatagcttaatcaagcgaagagacgatataactcgtctgaaaagtgttgcaagagcctctttgcggcttccaaccaccgttagtgtttctgattttggagctaaaggagatggaaaaaccgacgacacgcaggcgttcgtgaatgcatggaagaaagcttgttcttcaagtggagctgtaaatctcttagttcctgaaggaaaaacttattttctcaagtctcttcgattaaatggcccatgcaaatcagttcttaccgttcagattttaggaacgttatcggcttctcaacaacgatcggattatgaagatctcagcaaatggattacgtttgacggcgttaacagtctaacggttgatggcggagccaccggaactgtcaacggaaacggggcggaaacgtggtgggaaaactcatgcaaacggaacgaagctaagaaatgcacaaaagcccctacggctcttactttctacaactcgaagaatttaagagtgaataatctgagggtgaaagatgcgcaacagattcagatttcgattgagaaatgctccaacgttcaggtctcaaatgttgaggtcactgcacctgctgatagtcctaacactgatggtatccacatcactaacactcaaaacattcaagtctccaattccatcattggaacaggtgatgattgtatatctattgaaagtggatcacaaaacgttcaaatcaacgatttaacttgcggcccaggccacggtatcagcattgggagcttaggagatgacaattcaaaggcatttgtatcaggcgtgactgtggatggtgctaaactttccggtacagacaatggagttaggatcaaaactaaccagggaggttctggaactgctagcaacattatatttcagaacattcagatggagaatgtcgagaatccaatcataattgaccaagattattgcgacaagagcaaatgcactgaacaaaaatcagcggtccaaataaagaacgtggtgtaccggaacataagcggcacaagcgcatcggacatagcaataactttcaactgcagcaagaactatccatgccaaggaattgtactcgacaaagtgaacattaagggagggaaagccagttgcagcaatgctaatgtgatggataaagacggtgttttacctcagtgcaaatccacttgattaataagacctataaaaaaaactcacatagatgtataaaaatacatatataccgatacaaagtatacaaaattatgatatacacttgtggatatatacatggacaatgaatttaaacatattgtctatatgtcaaaaatagtttatgaatatacatatagacaacatggtccagagatttattgttttaatgtatatatatactactaaactacttgtctaaaatttcatgaataaaggattacgtttttaagtggttatgtatcatgatgttggttacagtatgatgtgtattgtagattttcaattaaaatatgaaaaagatgacatggctggtcaatgatgttacttgaccaactaattcaagctaaaaaaaaaaaaaaaaaaa

SEQ ID NO: 7567 - protein, 434 aa, Brassica napus
MAHCCTVLTGLLVWSLFMLSWCEASRNNINRYDHSYGTFKSNSLIKRRDDITRLKSVARASLRLPTTVSVSDFGAKGDGKTDDTQAFVNAWKKACSSSGAVNLLVPEGKTYFLKSLRLNGPCKSVLTVQILGTLSASQQRSDYEDLSKWITFDGVNSLTVDGGATGTVNGNGAETWWENSCKRNEAKKCTKAPTALTFYNSKNLRVNNLRVKDAQQIQISIEKCSNVQVSNVEVTAPADSPNTDGIHITNTQNIQVSNSIIGTGDDCISIESGSQNVQINDLTCGPGHGISIGSLGDDNSKAFVSGVTVDGAKLSGTDNGVRIKTNQGGSGTASNIIFQNIQMENVENPIIIDQDYCDKSKCTEQKSAVQIKNVVYRNISGTSASDIAITFNCSKNYPCQGIVLDKVNIKGGKASCSNANVMDKDGVLPQCKST

SEQ ID NO: 7568 - DNA, 1098 bp, Sitophilus oryzae
  CDS (1)..(1098)
atgaacgcactgctttacaacatcatatttcttgtttctttggcattagccaaaccttcaaacaactccttaggggccacttgtacagtaagttcatacgacgatgtggcatctgcgatttcaagttgcaccaccatcaacctgggctcttttacagtgccggccggtacaactttagctttaaaattaaaaaccggcaccactgtcaatatccaaggtactatcaaattcggataccaagaatggaaaggacctttggttcaagtgtcgggaaaacaagttacaattaatggtgctagtggaaaatttgatggagaaggtgctaactactgggacagtcaaggtgacaaaggaaaaacaaggccaaagtttatcaaaatatctactacatcaagttctactttcaatgatattactctgaaaaattgtcctcatcaatgcgtctctattagcagcgcttcagatactactttatcaggttggaacattgacgtatcagcaggagatagcgcaggtggacacaacactgacggcttcgatatctccggctcgaccggcatcaccattaaaaactccgttcccaagaaccaagacgattgcgtggctattaaccaaggttcaaacttggttttcgaaagcttaacatgcagcggtggacacgggctcagtctctcagtaggacaaagtactgagaatggggatgcaaacacagttaaaaacgtcgtttttagcgattgtaccgtaaagagttctcgaaatggcatccacataaagacgcacaaagatgccggtaccggtgcaatcagtgatgtgacttacgaaaacattaaactttctggaattaccaattatggcattaacgttcaagagatttatgcaaatggtggcgatagtgttgatccgttaggtaatatacctactacaaatttgaatctccaatcggtgacaggctccatgtctggaggatctagcagcatgtcggtatacattttatgcggcgatggaggatgcagtaattgggcatggtccggtgtttctatttccggcgcgaaaaaagcaaacagctgtaactttacgccctgtggattcacttgttaa

SEQ ID NO: 7569 - protein, 365 aa, Sitophilus oryzae
MNALLYNIIFLVSLALAKPSNNSLGATCTVSSYDDVASAISSCTTINLGSFTVPAGTTLALKLKTGTTVNIQGTIKFGYQEWKGPLVQVSGKQVTINGASGKFDGEGANYWDSQGDKGKTRPKFIKISTTSSSTFNDITLKNCPHQCVSISSASDTTLSGWNIDVSAGDSAGGHNTDGFDISGSTGITIKNSVPKNQDDCVAINQGSNLVFESLTCSGGHGLSLSVGQSTENGDANTVKNVVFSDCTVKSSRNGIHIKTHKDAGTGAISDVTYENIKLSGITNYGINVQEIYANGGDSVDPLGNIPTTNLNLQSVTGSMSGGSSSMSVYILCGDGGCSNWAWSGVSISGAKKANSCNFTPCGFTC

SEQ ID NO: 7570 - DNA, 1125 bp, Gibberella circinata
  CDS (1)..(1125)
atggttcggaacattgctctcgcggctttgctcccagctgcctgggctctgccttcaagctctctccaggaacgagatgcttgcaccgtgactgactactctggcctcgccaccgctgtctcatcctgcacaaacatcgtgctcaaaggtttccaagtcccgactggcaagcaacttgatcttttcaagctcaaggctggtacaaccgttaccttcaagggcacaactacctttgccaccactgccgataacgactttaaccccattgtcattagtggaagtggcatcaccatcactggtgcatctggccatgtcatcgatggcaatggccaagcatattgggatggccaaggttccaacaacgcagacaacccaaagcccgatcacttcatcgttgttaagaaggttaccggtacctcaaagattacaaacctcaacatccagaactggcccgttcactgcttcgacatcaccggcagttcagatctgaccatctcggggctcattctcgataacagagcaggcgacaagcccaattccaagagcggtggtttgcccgctgcgcataacagcgacggtttcgacatctcgtcctgtgaccacgtcacgctggataacaaccacgtttataaccaggatgactgtgttgccgtcacctctggcacaaacatcgtcgtttctaacatgtactgctccggtggtcatggtctcagcatcggttctgtcggcggaaagagcaccaatgtcgtgaatggtgtccagttcttgaactcacaaattgtgaacagtgagaatggatgccgcatcaagtccaactctggcacaactggcacgatcaacaacgttacctaccaaaacattgctcttaccaacatcagcaagtacggtgttgatgtccagcaggactacctcaacggcggccctactggaaagcccaccaacggcgtcaagattagcaacatcaaattcaccaaggtcactggcacggtggctagctcagctcagaattggtatattctgtgtggtgatggtagctgctctggatttactttctctggcaacgccattactggtggtggtaagactagcagctgcaactatcctaccaacacctgtccctcttaa

SEQ ID NO: 7571 - protein, 374 aa, Gibberella circinata
MVRNIALAALLPAAWALPSSSLQERDACTVTDYSGLATAVSSCTNIVLKGFQVPTGKQLDLFKLKAGTTVTFKGTTTFATTADNDFNPIVISGSGITITGASGHVIDGNGQAYWDGQGSNNADNPKPDHFIVVKKVTGTSKITNLNIQNWPVHCFDITGSSDLTISGLILDNRAGDKPNSKSGGLPAAHNSDGFDISSCDHVTLDNNHVYNQDDCVAVTSGTNIVVSNMYCSGGHGLSIGSVGGKSTNVVNGVQFLNSQIVNSENGCRIKSNSGTTGTINNVTYQNIALTNISKYGVDVQQDYLNGGPTGKPTNGVKISNIKFTKVTGTVASSAQNWYILCGDGSCSGFTFSGNAITGGGKTSSCNYPTNTCPS

SEQ ID NO: 7572 - DNA, 1113 bp, Aspergillus awamori
  CDS (1)..(1113)
atgccttctgccaagcctttgttctgcctcgcgaccctggccggtgccgctctggctgctcctgcgccttcccgcgccaccgacttcaacaagcggtccacctgcaccttcactgatgctgccaccgcctccgagagcaagacctcctgctccgacatcgtcctcaaggacatcaccgtccctgccggtgagacccttaacttgaaggacctcaacgatggcaccaccgtcacctttgagggaaccaccacctgggagtacgaggagtgggacggacccctcctccgtatctccggtaaggacatcaccgttacccagtcctccgacgccgtcctcaacggcaacggtgctaagtggtgggacggtgagggaaccaacggcggcaagaccaagcccaagttcttctacgcccatgacctcgatgactccaagatctccggtctctacatcaagaacacccctgtccaggccatctccgtcgagtcggacaacctcgtgatcgaggacgtcaccatcgacaacagcgacggtgattccgagggcggccacaacaccgacggtttcgacatcagcgagagtacctacatcaccatcaccggcgccaccgtcaagaaccagggtgactgcgtcgccatcaactccggcgagaacatctacttctccggcggtacctgctccggcggtcacggtctgtccatcggctccgttggtggccgcgacgacaacaccgtcaagaacgtcaccttcatcgactcgactgtctctgactccgagaacggtgttcgcatcaagaccgtttatgatgctaccggtaccgtcgaggacatcacctactccaacatccagctctccggcatctccgactacggtattgtcatcgagcaggactacgagaacggtgaccctaccggtaccccctccaacggtgttaccatctccgatgttaccctcgaggatatcactggctcggttgactccgacgctgttgagatctacatcctttgcggtgacggcagctgcactgactggaccatgtccggcattgacatcaccggcggtgagaccagcagcgattgcgagaatgttccctctggcgcttcctgcagtcagtaa

SEQ ID NO: 7573 - protein, 370 aa, Aspergillus awamori
MPSAKPLFCLATLAGAALAAPAPSRATDFNKRSTCTFTDAATASESKTSCSDIVLKDITVPAGETLNLKDLNDGTTVTFEGTTTWEYEEWDGPLLRISGKDITVTQSSDAVLNGNGAKWWDGEGTNGGKTKPKFFYAHDLDDSKISGLYIKNTPVQAISVESDNLVIEDVTIDNSDGDSEGGHNTDGFDISESTYITITGATVKNQGDCVAINSGENIYFSGGTCSGGHGLSIGSVGGRDDNTVKNVTFIDSTVSDSENGVRIKTVYDATGTVEDITYSNIQLSGISDYGIVIEQDYENGDPTGTPSNGVTISDVTLEDITGSVDSDAVEIYILCGDGSCTDWTMSGIDITGGETSSDCENVPSGASCSQ

SEQ ID NO: 7574 - DNA, 1089 bp, Aspergillus awamori
  CDS (1)..(1089)
atgcactcctttgcttctcttcttcgctacggcctagctgccggcgcaaccctcgcttccgcctctcccattgaagcccgggacagctgcaccttcaccacggctgctgctgccaaagcgggcaaggcgaaatgctctaccatcaccctcgacagcatcaaagtgcccgctggaaccaccctcgacctgaccggtctcaccagcggtaccaaggtcatcttcgagggcactacgaccttcgactatgaagattgggcaggccctttgatctccatgagtggcaaagacatcaccgtcactggtgcctcaggccacctcatcaactgcgacggttcgcggtggtgggacggtaaggggaccagcggaaagaagaagcccaagttcttctacgcccatggccttgactcctcgtccattactggattgaatatcaagaacactccccttatggcgtttagtgttgagtcggatgacatcaccctgactgacattaccatcaacaatgcggacggtgatagcctgggtggacacaacactgatgcgtttgatgttggtaactcggtcggtgtaaatatcatcaaaccatgggttcataaccaggatgactgtcttgcgatcaattctggcgagaacatctggttcaccggcggcacctgcattggcggccacggtctctccatcggctctgtcggcgaccgctccaacaacgtcgtcaagaatgtcacgattgagcactccaccgtgagcaattccgagaacgccgttcggatcaagactatctccggtgccactggctccgtgtctgagatcacctactccaacattgtcatgtccggcatctccgattacggcgtcgttatccagcaggattacgaggatggtaagcctacgggtaagcccacgaacggtgtcactattacggatgtcaaactggagagcgttactggtactgtggatagtaaggccactgatatctatcttctttgcggatctggtagctgctcggactggacttgggacgatgtgaaggtcactgggggaaagaagtctagcgcttgcaagaacttaccttcggtggcttcttgctag

SEQ ID NO: 7575 - protein, 362 aa, Aspergillus awamori
MHSFASLLRYGLAAGATLASASPIEARDSCTFTTAAAAKAGKAKCSTITLDSIKVPAGTTLDLTGLTSGTKVIFEGTTTFDYEDWAGPLISMSGKDITVTGASGHLINCDGSRWWDGKGTSGKKKPKFFYAHGLDSSSITGLNIKNTPLMAFSVESDDITLTDITINNADGDSLGGHNTDAFDVGNSVGVNIIKPWVHNQDDCLAINSGENIWFTGGTCIGGHGLSIGSVGDRSNNVVKNVTIEHSTVSNSENAVRIKTISGATGSVSEITYSNIVMSGISDYGVVIQQDYEDGKPTGKPTNGVTITDVKLESVTGTVDSKATDIYLLCGSGSCSDWTWDDVKVTGGKKSSACKNLPSVASC

SEQ ID NO: 7576 - DNA, 1089 bp, Aspergillus niger
  CDS (1)..(1089)
atgcatttcctccagaacgccgttgtggccgccactatgggcgctgcgctggccgccgctgctcctctcgagaagcgctcctgcactttcacctccgcctctgctgccaagtccggcaagtcctcttgctccaccatcaccctcgacaacatcgcggtccccgctggtgagactcttgacttgactggcctcaagaagggtaccaccgtcatcttcgagggtgagaccaccttcggctacaaggaatggaagggtcccctgatctccatgtccggtaccgacatcaccgtcaagcaggcctccggtgccaagatcaactgcgacggtgctcgctggtgggacggcaagggtagcaacggtggcaagaccaagcccaagttcttccaggcccacaagctcgaccagtccagcatcaccggcctgaaggtctacaacacccctgtccagggtttcagcattctggccgaccacctgaccatcaccgatgtgaccatcgacaactccgccggtaccagcaagggtcacaacaccgatgcctttgacattggccagagtacctacatcaccattgacggtgccaccgtctacaaccaggatgactgcctggccatcaactcgggtgagcacatcaccttcaccaacggctactgtgatggtggccacggtctctccatcggttccatcggtggccgcagtgacaacaccgtcaacgacgtgaccatctccaactccaaggtgctcaactcccagaacggtgtccgcatcaagaccatctacggcaagactggcactgtcgagaacgtcaagtttgaggacatcaccctgtccgacatcagcaagtacggtattgtcgttgagcaggactacgagaacggcagccccaccggcacgcccaccaacggtgtcaaggttgaggacatcactttcaagaaggtcaccggcagcgtcaagagctctggtactgacatctacatcctgtgcggttccggcagctgctcgaactggacctggagcggtgttgatgtgactggcggcaagaagagcagcaagtgcaagaacgtcccctcgggcgcttcctgcagcgattaa

SEQ ID NO: 7577 - protein, 362 aa, Aspergillus niger
MHFLQNAVVAATMGAALAAAAPLEKRSCTFTSASAAKSGKSSCSTITLDNIAVPAGETLDLTGLKKGTTVIFEGETTFGYKEWKGPLISMSGTDITVKQASGAKINCDGARWWDGKGSNGGKTKPKFFQAHKLDQSSITGLKVYNTPVQGFSILADHLTITDVTIDNSAGTSKGHNTDAFDIGQSTYITIDGATVYNQDDCLAINSGEHITFTNGYCDGGHGLSIGSIGGRSDNTVNDVTISNSKVLNSQNGVRIKTIYGKTGTVENVKFEDITLSDISKYGIVVEQDYENGSPTGTPTNGVKVEDITFKKVTGSVKSSGTDIYILCGSGSCSNWTWSGVDVTGGKKSSKCKNVPSGASCSD

SEQ ID NO: 7578 - DNA, 1155 bp, Leptosphaeria maculans
  CDS (1)..(1155)
atggttgccttaactcttggttttgtcgccacggcgctggtggcgtcttctgttgcagctcccgccccggagattgacggagcacacaatgctccagtcacagctaaacgtgctgatagctgtacgttcactggggctaatggtgctgctgaagcctctaaggctagcaaatcatgcaccaccatggtcctcgacaaccttgccgtaccagccggtaccactctagacctttccagtttggctgatggcacgactgtcatcttccaaggtacaactacttggggctacaaagagtgggccggcccccttcttagcatcggtggcaacaagatcacagtcaaaggggcttctggcagtcttctgaatcccgatggagcacgttggtgggatggaaaaggtggcaatggaggcaaagacaagccaaagttctttgccgcacacagtctcactgactccaccattaccgacgtgaacatcaagaacacccctgttcaagccgtcagcattgcaagttgcgatggcctcaccatcaccggcatgacgattgacgattccgagggcgatgccaacgaactcgggcacaacactgacgcgttcgacattgggaccagcaagaacatcatgattgatggtgcaaaggtgcacaaccaggacgactgcgtggccgtaaactctggaacaaacatcaccttccaaaacggcctctgctctggcggccacggcctctccattggctccgtcggcggccgcgcagacaacacagtcgacactgtcaccttcaacaacaacgtcgtcacaaaatccacaaacggaatccgcgtcaaagccaaagttggtgcaacgggcaaaatcaacaacgtcgtctacagcaagaccacgctgtcctccatctcaaagtacggcgtgctggttgagcagaactacgatggcggcgatctccatggcacgccggataccggtattccgatcacgggcctggtgctgagcgatgttaagggtgagggtgcggttgcggccaacgggtttaatgtcgtggttacgtgtgggagtgagacatcttgcactggctggaaatgggacaatgttgtgattactggtggcagtaaggtgtacgggaactgtacgaatgttccgtctgttaccaagtgctcctaa

SEQ ID NO: 7579 - protein, 384 aa, Leptosphaeria maculans
MVALTLGFVATALVASSVAAPAPEIDGAHNAPVTAKRADSCTFTGANGAAEASKASKSCTTMVLDNLAVPAGTTLDLSSLADGTTVIFQGTTTWGYKEWAGPLLSIGGNKITVKGASGSLLNPDGARWWDGKGGNGGKDKPKFFAAHSLTDSTITDVNIKNTPVQAVSIASCDGLTITGMTIDDSEGDANELGHNTDAFDIGTSKNIMIDGAKVHNQDDCVAVNSGTNITFQNGLCSGGHGLSIGSVGGRADNTVDTVTFNNNVVTKSTNGIRVKAKVGATGKINNVVYSKTTLSSISKYGVLVEQNYDGGDLHGTPDTGIPITGLVLSDVKGEGAVAANGFNVVVTCGSETSCTGWKWDNVVITGGSKVYGNCTNVPSVTKCS

SEQ ID NO: 7580 - DNA, 1089 bp, Chondrostereum purpureum
  CDS (1)..(1089)
atgccttcgttatcctcgatccttaagggccttggcgacgtcaccctttttgcctctgtggctactgtaacggccgtgccgaagcgagcatcctgcaccgttgcctcagttagcgatgctgcaaatatttcgggatgtacctctgtgaccataaaatcgtttaccgtaccttcgggccaaactcttgttctaaacccctcagacggtaccaccgtagctatggttggcgatgtcacatttgcaaagacgacatcgtctggtcctctgtttaccattgatggctcgaacatcaaatttaaaggcgcaggacataagttcgacggaaatggcgcaaagtattgggatgggcaggggactaacggtggcgttaccaaaccccatcctttcctcaaattcaaaggatcaggtcaatactcgagtttcactgtcctaaacagccctgcgcaggcaatatctatcggaaatagtgacggcctaacctttgacactgtcactgtggacaatagtgccggagatagtggtagtctcgggcacaacactgatggcttcgatgtatctgcggacaatgttaccatccagaatagtgttgtcaaaaaccaagatgactgcattgccatcaacgatggctctaatattgttttccaaaacaatcagtgctctggagggcacggtatttctgttggttctatcgcctcaggaaagcacgtatcgggtgtagcaatcaaaggaaacacggtcacaaacagcatgtatggcatgcgtgtcaaggtcaaggctgctgcaacctctgcttcagtctctgctgtgacttacagtggcaacaccatttctgcgattgccaagtatggcttcctcgtctcgcagtcttacccagatgatgcttcaactcccggaactggcgcccccatctcggggatcaacttcagtggtgatactaccaatatcaaagtaaacagtggagcgaaacgggtcactgtcgactgtcgtagttgcaccggcacgtggaactggtctaagctgaccgctacagggggaagtgccggcactatctccagtgacaaagctaagatttctggcggctcatactag

SEQ ID NO: 7581 - protein, 362 aa, Chondrostereum purpureum
MPSLSSILKGLGDVTLFASVATVTAVPKRASCTVASVSDAANISGCTSVTIKSFTVPSGQTLVLNPSDGTTVAMVGDVTFAKTTSSGPLFTIDGSNIKFKGAGHKFDGNGAKYWDGQGTNGGVTKPHPFLKFKGSGQYSSFTVLNSPAQAISIGNSDGLTFDTVTVDNSAGDSGSLGHNTDGFDVSADNVTIQNSVVKNQDDCIAINDGSNIVFQNNQCSGGHGISVGSIASGKHVSGVAIKGNTVTNSMYGMRVKVKAAATSASVSAVTYSGNTISAIAKYGFLVSQSYPDDASTPGTGAPISGINFSGDTTNIKVNSGAKRVTVDCRSCTGTWNWSKLTATGGSAGTISSDKAKISGGSY

SEQ ID NO: 7582 - DNA, 1305 bp, Penicillium griseoroseum
  CDS (133)..(1263)
tccagttcgtttcaggatgaaccgtagaggtatataagactcccctcgtctgctctttgcttgaaaatcataaacaaaccatcacactcttttaaaaccccacattcatttctatttcatattttctttatcatggcctccagtctcaaacttggcttgattgccctactcggtgcgactgctgtcaacgcagctcccgccgctgagcccgttcttggaacctctctccttacttctcgtgcttcttgtaccttctccggctccagcggtgctgcggaagccatcaagagcaagacctcttgctcaaccattaccctgagcaacgtcgaagtcccggccggaactactctggacctgacaggactcaagtccggtaccaccgtcatcttcgaaggaaccaccaccttcggttacaaggaatgggaaggtcctctggtctccgtctccggaacctccatcaccgtccagggtgcctcaggcgcgcagctcaacggtgatggtgcccgctggtgggacggcaagggaaccaacggcggcaagaccaagcccaagttcttctacgctcacagcttgaccaactccaagatcgagaacatctacatcaagaactcccccgtgcaggtcttcagcatcaacggcgccaaggagctgactcttagcggaatcaccgtcgacaccgctgacggcgatagcaacggcggccacaacaccgacgctttcgacgtcggctccagcaacggtgtctacatcaccagccctatcgtccacaaccaggatgactgcctggctgtcaactccggcactaacgtccacttcactggcgctcagtgcactggcggccacggtatctccatcggctccgtcggtggacgctccgacaacaccgttgacggtgtcaccgtcgagagctgcaccatcaaggactccgacaacggcgtccgcatcaagaccgtctacggcgccaccggtgcagtccaaggcgtcacctacaaggacatcactctctccggaattgccaagtacggtatcgtcatcgagcaggattacgagaacggtagccctaccggaacccccaccagcggtgtccccattaccgacttgaccctcgacaacgtccacggaactgtcgccagcagtggtgtcgatacctacatcctgtgtgcttctggtgcttgctccgactggtcttggagcggcgttagcatcaccggtggtcagactagcaagaagtgcaagggtattcccagcggtgctagctgctaaattctgcgaattttgagtcggactgtgtaggcctttttaact

SEQ ID NO: 7583 - protein, 376 aa, Penicillium griseoroseum
MASSLKLGLIALLGATAVNAAPAAEPVLGTSLLTSRASCTFSGSSGAAEAIKSKTSCSTITLSNVEVPAGTTLDLTGLKSGTTVIFEGTTTFGYKEWEGPLVSVSGTSITVQGASGAQLNGDGARWWDGKGTNGGKTKPKFFYAHSLTNSKIENIYIKNSPVQVFSINGAKELTLSGITVDTADGDSNGGHNTDAFDVGSSNGVYITSPIVHNQDDCLAVNSGTNVHFTGAQCTGGHGISIGSVGGRSDNTVDGVTVESCTIKDSDNGVRIKTVYGATGAVQGVTYKDITLSGIAKYGIVIEQDYENGSPTGTPTSGVPITDLTLDNVHGTVASSGVDTYILCASGACSDWSWSGVSITGGQTSKKCKGIPSGASC

SEQ ID NO: 7584 - DNA, 1143 bp, Botrytis cinerea
  CDS (1)..(1143)
atggttaagttttctgcctgtctcctcttgggagggctttccgctttggcttcggctcttcccgccgcagcacctgctccaacggctgctccagatcttgataagcgagcaactacctgcactttctccggctcaggaggagcttcatcagcaagcaagtccaagacttcttgttcaaccatcattctatctgcacttgcagtcccatctggcacgaccttggatttgacaggtcttactaaaggaactacagtcatctttgaaggtatcaccaccttcggctatgaagaatggtctggtcctttggtctctgtttcgggaacagatatcactgttactcaaaccactggtgcttacctcgatggcggcggagcttcttactgggatggagaaggttccaacggaggaaagacgaagcccaaattcttttacgcacacagcttaatctcctcaactattgagaacctttacttctacaacccacccgtccaagtgatgagtatcaacagcgctaccgatttgacagtttccggagttaccatcaatgcacaggatggtgacactgacagtcttggtgctaacacggatggttttgatattggatccagcacgaccgtcaccatcaccggtgctaatgtatacaatcaagatgactgcgtggctatcaactccggaactggcattactttctcaggaggtgtttgttccggtggccatggtctctcagttggatctgtcggcggtagagatgataacattgttgagactgtcttgttcgaaaactccgagatcaaagcatcgcaaaatggtatccgtatcaagaccatctctggtgatacaggaaccgtctctggcatcacttactcaggcattaccctttccggtatcaccgactacggtatcacagtcaatcaagcttatgatggaacgtccggtgagccaaccaatggcgttgccatctccaaattcattctcgaaaatattactggaaccgttgaatctaccgccaccaacattcttattgagtgtggaagtggttcttgcaccgattggacatggaccgatgtttccgtgacaggcggcaagacgtcatcctcttgtcttaacgtcccaacaagcggcggtgtctcttgttccttgtag

SEQ ID NO: 7585 - protein, 380 aa, Botrytis cinerea
MVKFSACLLLGGLSALASALPAAAPAPTAAPDLDKRATTCTFSGSGGASSASKSKTSCSTIILSALAVPSGTTLDLTGLTKGTTVIFEGITTFGYEEWSGPLVSVSGTDITVTQTTGAYLDGGGASYWDGEGSNGGKTKPKFFYAHSLISSTIENLYFYNPPVQVMSINSATDLTVSGVTINAQDGDTDSLGANTDGFDIGSSTTVTITGANVYNQDDCVAINSGTGITFSGGVCSGGHGLSVGSVGGRDDNIVETVLFENSEIKASQNGIRIKTISGDTGTVSGITYSGITLSGITDYGITVNQAYDGTSGEPTNGVAISKFILENITGTVESTATNILIECGSGSCTDWTWTDVSVTGGKTSSSCLNVPTSGGVSCSL

SEQ ID NO: 7586 - DNA, 1137 bp, Aspergillus aculeatus
  CDS (1)..(1137)
atgcaccttaacaccaccctactcgtctcgctcgccctcggggccgcgagcgtcctcgccagcccagccccaccagcaatcacggccccgcccacggccgaggagatcgcgaagcgcgcgacgacctgcacgttctccggatcgaacggcgcctcgtcggccagcaagtccaagacctcgtgctcgaccattgtgttgtcgaatgtggccgttccgtcggggacgacgctggacctgaccaagctgaacgacgggactcatgtgatcttctcaggcgaaaccaccttcggctacaaggaatggagcggccccctgatctccgtctccgggagcgacctgaccatcaccggggcgagcgggcacagcatcaacggggacggcagccggtggtgggacggcgagggcgggaacgggggcaagacgaagcccaagttcttcgcggcgcacagcctgaccaactcggtgattagcgggctgaagatcgtcaactcgccggtgcaggttttcagcgttgcggggtcggattatctgaccctcaaggatatcacgatcgacaactcggacggcgacgacaatggcgggcataataccgatgcgtttgatatcggcacgagcacgtatgtcacgatctcgggcgccacggtgtataatcaggatgattgcgtggctgtgaattcgggggagaatatctacttctcgggcggctactgctccggtggacacggcttgtccattggttcggtgggcggacgcagtgataatacggttaagaacgtgacgtttgtggattcgacgatcattaactcagataatggcgtccgcatcaaaaccaacatcgacaccaccggctccgtgtccgacgtcacctacaaggacatcacgctcacctccatcgccaagtacgggatcgtggtgcagcagaactacggcgacacgtcatcgacgcccacgacgggggtgccgatcacggactttgtgctggacaacgtgcacggctcggtggtcagctcggggaccaacatcctcatctcgtgcgggtcgggcagttgttcggattggacgtggacggatgtgagtgtcagtggggggaagacgagttccaagtgtacgaatgtgccgagtggggctagttgttga

SEQ ID NO: 7587 - protein, 378 aa, Aspergillus aculeatus
MHLNTTLLVSLALGAASVLASPAPPAITAPPTAEEIAKRATTCTFSGSNGASSASKSKTSCSTIVLSNVAVPSGTTLDLTKLNDGTHVIFSGETTFGYKEWSGPLISVSGSDLTITGASGHSINGDGSRWWDGEGGNGGKTKPKFFAAHSLTNSVISGLKIVNSPVQVFSVAGSDYLTLKDITIDNSDGDDNGGHNTDAFDIGTSTYVTISGATVYNQDDCVAVNSGENIYFSGGYCSGGHGLSIGSVGGRSDNTVKNVTFVDSTIINSDNGVRIKTNIDTTGSVSDVTYKDITLTSIAKYGIVVQQNYGDTSSTPTTGVPITDFVLDNVHGSVVSSGTNILISCGSGSCSDWTWTDVSVSGGKTSSKCTNVPSGASC

SEQ ID NO: 7588 - DNA, 1092 bp, Colletotrichum lindemuthianum
  CDS (1)..(1092)
atggtctcttacctcttcgtgctcggcgccctggcttctgttgccatcgcctcccccgtccccgagctcaaggcccgcgccagctgcaccttcaccgatgctgcctctgccatcaagggcaaggccagctgcaccaccatcgtcctcaacaatattgcggtccctgccggcaccaccctcgacatgaccggcctcaagtctggcactcacgtaagtttctctggcaaaaccaccttcggctacaaggagtgggagggccccctcatctccttctccggctccaacgtcgtcatcgacggcgcctccggccactccatcgactgccagggctcccgctggtgggactccaagggcggcaacggcggcaagaccaagcccaagttcttctacgcccacagcctcaaggactcgaccatcaggggcctccacacgctcaacacccccgtccaggccttctccatcaacggcgccgccaacctcggcgtctacgacgtctccgtcgacaactcggccggcgactccgccggcggccacaacaccgacgccttcgacgtcggctcctccaccggcgtctacatctctggcgccgacgtcaagaaccaggacgactgcctcgccgtcaactcgggcaccaatattaccttcaccggcggcacctgctccggcggccacggtctttccatcggctccgttggcggccgcaaggataatgtcgtcaagagcgtcagcatcaccaactccaagattatcaactcggataacggcgtgcgtatcaagaccgtggccggcgctactggtcccgtttccgacatcacctactcgggcatcaccctctccaacatcgccaagtacggcatcgtcatcgaacaggactacgagaacggttctcccaccggcaagcccacctccggtgtccctatttccggcctcaccctcagcaagatcagcggttccgtctcctcctccgccacccccgtttacatcctctgcgcctcctgcaccaactggaagtggtccggcgtcagcgtcaccggcggcaagaagtcctccaagtgcaccggtatccccagcgggagcggtgctgcttgctaa

SEQ ID NO: 7589 - protein, 363 aa, Colletotrichum lindemuthianum
MVSYLFVLGALASVAIASPVPELKARASCTFTDAASAIKGKASCTTIVLNNIAVPAGTTLDMTGLKSGTHVSFSGKTTFGYKEWEGPLISFSGSNVVIDGASGHSIDCQGSRWWDSKGGNGGKTKPKFFYAHSLKDSTIRGLHTLNTPVQAFSINGAANLGVYDVSVDNSAGDSAGGHNTDAFDVGSSTGVYISGADVKNQDDCLAVNSGTNITFTGGTCSGGHGLSIGSVGGRKDNVVKSVSITNSKIINSDNGVRIKTVAGATGPVSDITYSGITLSNIAKYGIVIEQDYENGSPTGKPTSGVPISGLTLSKISGSVSSSATPVYILCASCTNWKWSGVSVTGGKKSSKCTGIPSGSGAAC

SEQ ID NO: 7590 - DNA, 1113 bp, Penicillium olsonii
  CDS (1)..(1113)
atgcgtacctccattctgtctatgctcgccctcggcgctgctgccgtctccgccgcccctgcggctgccgctgctcctgctgagctcgttgagcgcggttcttcctgcaccttcacctccgcttctgctgctaaggccggcaagaagtcttgctccagcatcgtccttgacaacatcaaggtccccgctggtgagactcttgatctgtccaacctcaagagcggcaccaaggtcaccttcaagggtgagaccaccttcggttacaaggagtggaagggtcccctcatccgcttctccggtaagaacatcgaggtgaacggtgcttccggccatgtcatcaacggtggcggtgccagctggtgggacggcaagggaaccaacggcggcaagaccaagcctaagttcttctacgcccactctctggacgactcgaccatcaccggtctcaacgtcaagaacacccccgtccagggcttcagtgttcaggccgacaacctggtcctcgaccacatcaccatcgacaacaccgacggtgacaagaccaatggtggccacaacaccgatgccttcgatgtcggcgagtccacctacatcaccatcagcaacgccaacatcaagaaccaggatgactgcctggccatcaactctggcgagaacatcatcttcactggtggtacctgctccggtggccacggtctctccatcggctccgtcggtggacgtgacgacaacaccgtcaagaacgtgaccatctccgactccaccgtctccaactccgacaacggtatccgcatcaagaccatctacaaggccaagggtgaggtcgccgacgtcaccttctccaacatcgagctctccaacatcgccaagtacggtatcgtcatcgagcaggactacgagaacggcagccccaccggcaagcccaccaccggtgtccccatcactggcctcactgtcgagaaggtcactggtagcgtcaagtccagcggtaccgatgtctacatcctttgcggttccggctcttgctccgactggacctggtctggcaacaaggtctccggcggtaagaccagcagcaagtgcaagaacgtgccctccggtgcctcttgctaa

SEQ ID NO: 7591 - protein, 370 aa, Penicillium olsonii
MRTSILSMLALGAAAVSAAPAAAAAPAELVERGSSCTFTSASAAKAGKKSCSSIVLDNIKVPAGETLDLSNLKSGTKVTFKGETTFGYKEWKGPLIRFSGKNIEVNGASGHVINGGGASWWDGKGTNGGKTKPKFFYAHSLDDSTITGLNVKNTPVQGFSVQADNLVLDHITIDNTDGDKTNGGHNTDAFDVGESTYITISNANIKNQDDCLAINSGENIIFTGGTCSGGHGLSIGSVGGRDDNTVKNVTISDSTVSNSDNGIRIKTIYKAKGEVADVTFSNIELSNIAKYGIVIEQDYENGSPTGKPTTGVPITGLTVEKVTGSVKSSGTDVYILCGSGSCSDWTWSGNKVSGGKTSSKCKNVPSGASC

SEQ ID NO: 7592 - DNA, 1089 bp, Aspergillus niger
  CDS (1)..(1089)
atgcactcgtttgcttctcttctcgcctacggcctggtcgccggcgccaccttcgcttctgcctctcctatcgaagctcgagacagctgcacgttcaccaccgctgccgctgctaaagcgggcaaggcgaaatgctctactatcacccttaacaacatcgaagttccagctggaaccaccctcgacctgaccggtctcaccagcggtaccaaggtcatcttcgagggcaccacgaccttccagtacgaagaatgggcaggccccttgatctccatgagtggcgaacatatcaccgtcactggtgcctccggccacctcatcaattgcgatggtgcgcgctggtgggatggcaagggaaccagcggaaagaagaagcccaagttcttttacgcccatggccttgactcctcgtctattactggattaaacatcaaaaacaccccccttatggcgtttagtgtccaggcgaatgacattacgtttaccgatgttaccatcaataatgcggatggcgacacccagggtggacacaacactgatgcgttcgatgttggcaactcggtcggggtgaatatcattaagccttgggtccataaccaggatgactgtcttgcggttaactctggcgagaacatctggttcaccggcggcacctgcattggcggccacggtctctccatcggctctgtcggcgaccgctccaacaacgtcgtcaagaacgtcaccatcgaacactccaccgtgagcaattccgaaaacgccgtccgaattaagaccatctctggcgccactggctccgtgtccgagattacgtactccaacatcgtcatgtctggcatctccgattacggcgtggtcattcagcaggattacgaagacggcaagcctacgggtaagccgacgaacggtgtcactattcaggatgttaagctggagagcgtgactggtagcgtggatagtggggctactgagatctatcttctttgcgggtctggtagctgctcggactggacctgggacgatgtgaaagttaccggggggaagaagtccaccgcttgcaagaacttcccttcggtggcctcttgttag

SEQ ID NO: 7593 - protein, 362 aa, Aspergillus niger
MHSFASLLAYGLVAGATFASASPIEARDSCTFTTAAAAKAGKAKCSTITLNNIEVPAGTTLDLTGLTSGTKVIFEGTTTFQYEEWAGPLISMSGEHITVTGASGHLINCDGARWWDGKGTSGKKKPKFFYAHGLDSSSITGLNIKNTPLMAFSVQANDITFTDVTINNADGDTQGGHNTDAFDVGNSVGVNIIKPWVHNQDDCLAVNSGENIWFTGGTCIGGHGLSIGSVGDRSNNVVKNVTIEHSTVSNSENAVRIKTISGATGSVSEITYSNIVMSGISDYGVVIQQDYEDGKPTGKPTNGVTIQDVKLESVTGSVDSGATEIYLLCGSGSCSDWTWDDVKVTGGKKSTACKNFPSVASC

SEQ ID NO: 7594 - DNA, 1089 bp, Aspergillus tubingensis
  CDS (1)..(1089)
atgcactcctttgcttctcttctggcctacggcctagccgccagcgccaccctcgcttctgcctcccccatcgaagcccggggaagctgcaccttcaaaacggctgctgctgccaaagcgggcaaggcagggtgctctaccatcacccttgacaacatcgaagtccccgctggaaccaccctcgacctgaccggtctcaccagcggtacgaaggtcatcttcgagggcaccacgaccttcgattatgaagaatgggcaggccccttgatctccatgagtggcaaagatatcaccgtcactggtgcctcaggccatctcatcaactgcgacggtgcgcggtggtgggacggcaaggggaccagcggaaagaagaagcccaagttcttctacgctcatggccttgactcctcgtccattactggattgaatatcaagaacactccccttatggcgtttagtgttcaggcggatgacatcactctgactgacattaccatcaacaacgcggacggtgataccctgggtggacacaacactgatgcgtttgatgttggtaactctgtcggtgtgaatatcatcaaaccgtgggtccataaccaggatgactgtcttgcgatcaactctggcgagaacatctggtttaccagcggcacctgcattggcggccacggtctctccatcggttctgtcggcggccgctccaacaacgttgtcaagaacgtcactatcgaacactccaccgtgagcaattccgagaacgccgtccggattaagaccgtctctggtgccactggttccgtgtctgagatcacatactccaacattgtcatgtccggcatctccgattacggcgtcgttatccagcaggattacgaggatggcaagcctacgggtaagcccacgaacggtgtcactattacggatgtcaagctggagagcgtgactggtactgtggatagtaaggctactgatatctatctcctttgcggatctggtagctgctcggactggacttgggacgatgtgaaggtcactggaggaaagaagtctactgcttgcaaaaactacccttcggtggcttcttgctag

SEQ ID NO: 7595 - protein, 362 aa, Aspergillus tubingensis
MHSFASLLAYGLAASATLASASPIEARGSCTFKTAAAAKAGKAGCSTITLDNIEVPAGTTLDLTGLTSGTKVIFEGTTTFDYEEWAGPLISMSGKDITVTGASGHLINCDGARWWDGKGTSGKKKPKFFYAHGLDSSSITGLNIKNTPLMAFSVQADDITLTDITINNADGDTLGGHNTDAFDVGNSVGVNIIKPWVHNQDDCLAINSGENIWFTSGTCIGGHGLSIGSVGGRSNNVVKNVTIEHSTVSNSENAVRIKTVSGATGSVSEITYSNIVMSGISDYGVVIQQDYEDGKPTGKPTNGVTITDVKLESVTGTVDSKATDIYLLCGSGSCSDWTWDDVKVTGGKKSTACKNYPSVASC

SEQ ID NO: 7596 - DNA, 1490 bp, Arabidopsis thaliana
  CDS (81)..(1451)
aaagccttcgcttcaacaacattttttctttagtcgtaaacatattcattcatgattttaacgctttttcttcaaaatatatgaagaagaagacttggttcttgaatttctcactgttctttcttcaaatcttcacatcttcgaatgcattggatgttactcaattcggagcggttggagatggagttacagacgattcacaggcgttcttgaaagcttgggaagctgtgtgtagcggaacaggagatgggcagtttgtcgttccggcagggatgacatttatgttacagcccctgaagtttcaagggtcttgcaaatccacccctgtttttgttcagatgttaggcaagctggttgcaccgagtaaaggaaattggaaaggggacaaagatcaatggattctttttacagacattgaaggacttgtgattgaaggtgacggtgaaattaacggccagggttcgagctggtgggaacacaaaggctctagacctaccgcattgaagttcaggagctgcaacaaccttagattgagtgggttaacgcatttagatagtccaatggctcacattcacataagcgagtgcaactatgtgaccatctcaagcctacgaataaatgcacctgaatcaagtcctaacaccgatggaatcgacgtaggggcttcatccaacgttgtcatccaggattgcatcatcgcaaccggtgatgattgcattgcgattaattcggggacgtctaacatccacatttccggtatagattgcggaccaggccatgggataagcataggaagcttgggaaaagatggagagacagctacagtggagaatgtatgtgtccaaaactgtaactttagaggaactatgaatggagctcggatcaaaacttggcagggcggatcgggttacgcgagaatgattactttcaatggaattactctagacaatgttgaaaatccaatcataatcgatcagttctataacggtggcgattccgataatgccaaagatcgtaagtcgtcggcagtggaagtgagcaaagtggtgtttagtaatttcattgggacgtcaaagtcagagtacggtgttgacttccgatgcagcgagagagttccatgcacagagattttcttgagagacatgaaaatagaaacggcatcatcaggatcaggacaagtcgcacaaggacagtgtttaaacgtgagaggtgcgtctacaattgctgtaccaggtctagaatgtttagaactttccacagatatgttttcatcggcgcaattgctggaacaaacttgcatgtcggcacaatcagtgcaaccaagaacaacaacacaaccgatgcaagatccaatatgggtttttcaaagcagagggaaacaacttagagtttacaatattgccatattagtttcatttatctctttggttacatatattttagctagataggttacatatattatgcgagtaaaatttgtaatctaattg

SEQ ID NO: 7597 - protein, 456 aa, Arabidopsis thaliana
MKKKTWFLNFSLFFLQIFTSSNALDVTQFGAVGDGVTDDSQAFLKAWEAVCSGTGDGQFVVPAGMTFMLQPLKFQGSCKSTPVFVQMLGKLVAPSKGNWKGDKDQWILFTDIEGLVIEGDGEINGQGSSWWEHKGSRPTALKFRSCNNLRLSGLTHLDSPMAHIHISECNYVTISSLRINAPESSPNTDGIDVGASSNVVIQDCIIATGDDCIAINSGTSNIHISGIDCGPGHGISIGSLGKDGETATVENVCVQNCNFRGTMNGARIKTWQGGSGYARMITFNGITLDNVENPIIIDQFYNGGDSDNAKDRKSSAVEVSKVVFSNFIGTSKSEYGVDFRCSERVPCTEIFLRDMKIETASSGSGQVAQGQCLNVRGASTIAVPGLECLELSTDMFSSAQLLEQTCMSAQSVQPRTTTQPMQDPIWVFQSRGKQLRVYNIAILVSFISLVTYILAR

SEQ ID NO: 7598 - DNA, 1092 bp, Aspergillus oryzae
  CDS (1)..(1092)
atgcagcttcttcaatcttccgtcattgccgctactgtcggcgctgcgctggtcgccgcagtcccagtagaactcaaagcccgcgactcctgtactttcacctcggctgccgacgctaagtcgggcaagacctcttgctcaaccatcactctgagcaacatcgaggttcccgctggtgaaacccttgatctgaccggtctcaacgatggcaccactgtcatcttctcgggtgagaccactttcggctacaaggagtgggagggtcctctcatctccgtgtccggaaccaacatcaaagtccaacaggcatccggtgccaagattgacggagacggatcccgctggtgggatggcaagggtggcaatggtggaaagacaaagcccaagttcttctacgcccacaagctggactcctcttccatcaccggcctccagatctacaacacccccgtccagggcttcagcatccagtcggacaacctgaacatcactgatgttaccatcgataactccgctggtaccgcagagggccacaacaccgacgccttcgatgtcggctctagcacctacatcaacattgacggtgccaccgtgtacaaccaggatgactgtctcgccatcaactctggatcgcacatcactttcaccaacggctactgtgacggtggccatggtctctccatcggttcggtcggtggtcgtagcgacaacaccgtcgaagacgtgaccatctccaactccaaggttgtcaactcccagaatggtgtccgtatcaagaccgtctacgatgccaccggtaccgtctccaacgtcaagttcgaggatatcactctttccggtattaccaagtacggactcatcgttgagcaggattacgagaacggcagccccactggtacccctaccaacggtatcaaggtctctgatatcaccttcgacaaggttaccggtaccgttgagagcgacgctactgacatctacattctctgtggatctggcagctgcactgactggacctggtccggtgtttccatcactggtggtaagactagctccaagtgcgagaacgtttctactggtgcttcttgttaa

SEQ ID NO: 7599 - protein, 363 aa, Aspergillus oryzae
MQLLQSSVIAATVGAALVAAVPVELKARDSCTFTSAADAKSGKTSCSTITLSNIEVPAGETLDLTGLNDGTTVIFSGETTFGYKEWEGPLISVSGTNIKVQQASGAKIDGDGSRWWDGKGGNGGKTKPKFFYAHKLDSSSITGLQIYNTPVQGFSIQSDNLNITDVTIDNSAGTAEGHNTDAFDVGSSTYINIDGATVYNQDDCLAINSGSHITFTNGYCDGGHGLSIGSVGGRSDNTVEDVTISNSKVVNSQNGVRIKTVYDATGTVSNVKFEDITLSGITKYGLIVEQDYENGSPTGTPTNGIKVSDITFDKVTGTVESDATDIYILCGSGSCTDWTWSGVSITGGKTSSKCENVSTGASC

SEQ ID NO: 7600 - DNA, 1288 bp, Aspergillus parasiticus
  CDS (61)..(1152)
tctttcagttcatatttgaaggcgtcttgttgaccaagtccctatccattctttcggaaaatgcagcttcttcaatcttccgtcattgccgctactgtcggcgctgcgctggtcgccgcagccccagtagaacttgaagcccgcgactcctgtactttcacctcggctgccgacgctaagtcgggcaagacctcttgctcaaccatcactctgagcaacatcgaggttcccgctggtgaaacccttgatctgaccggtctcaacgatggcaccactgtcatcttctcgggtgagaccactttcggctacaaggagtgggagggccctctcatctcggtgtccggaaccaacatcaaggtccaacaggcatccggtgccaagattgacggagacggatcccgctggtgggatggagagggtggcaatggtggaaagaccaagcccaagttcttctacgcccacaagctagactcctcttccatcaccggcctccagatctacaacacccctgtccagggcttcagcattcagtcggacaacctgaacatcactgatgttaccatcgataactccgctggtactgcagagggccacaacaccgacgccttcgatatcggctctagcacctacatcaacattgacggtgccaccgtgtacaaccaggatgactgtctcgccatcaactctggatcgcatatcactttcaccaacggctactgtgatggtggtcacggtctctccatcggttccgtcggtggtcgtagcgacaataccgtcgaagacgtgaccatctccaactccaaggttgtcaactctcagaacggtgtccgtatcaagaccgtctacggtgccaccggcactgtctccaacgtcaagtttgaggatatcaccctttccggtattaccaagtacggactcgtcgttgagcaggattacgagaacggcagccccactggtacccctaccaacggtatcacggtctcaggtatcaccttcgagaaggttaccggtaccgtcgagagcgacgctactgatatctacattctctgtggatctggcagctgcactgactggacttggtctggtgtctccatcactggtggtaagactagctccaagtgcgagaatgttccgactggcgcttcttgttaaatacggacgcacgggcgcagtttagccggccattgtgatatctattgttcttggtgttagtgctattttttggcactgactgtttaatctagctttacataactactaagcaattcaacttctttacatgttgtga

SEQ ID NO: 7601 - protein, 363 aa, Aspergillus parasiticus
MQLLQSSVIAATVGAALVAAAPVELEARDSCTFTSAADAKSGKTSCSTITLSNIEVPAGETLDLTGLNDGTTVIFSGETTFGYKEWEGPLISVSGTNIKVQQASGAKIDGDGSRWWDGEGGNGGKTKPKFFYAHKLDSSSITGLQIYNTPVQGFSIQSDNLNITDVTIDNSAGTAEGHNTDAFDIGSSTYINIDGATVYNQDDCLAINSGSHITFTNGYCDGGHGLSIGSVGGRSDNTVEDVTISNSKVVNSQNGVRIKTVYGATGTVSNVKFEDITLSGITKYGLVVEQDYENGSPTGTPTNGITVSGITFEKVTGTVESDATDIYILCGSGSCTDWTWSGVSITGGKTSSKCENVPTGASC

SEQ ID NO: 7602 - DNA, 1104 bp, Penicillium digitatum
  CDS (1)..(1104)
atgcgcacatctttcgttaccatgctggccctcggcgccgccgccgtgtccgctgccccagctgctcctgttactgatctcgttgagcgcggctcgagctgcaccttcaccaccgctgaagcggccaaggctggcaagggatcttgctccaccattgtgctggacaacatcaaggtccctgccggtgagaccctcgaccttaccaagctgaagtccggtactcaggtcgtcttcaagggcgaaacctctttcggatacaaggagtggactggccccctcgtcagcttctccggaagcaacattcacgtctccggcgctgccggccatgtcatcaacggtggcggtcccagctggtgggacggcaagggaaccaacggcggaaagaagaagcccaagttcttctacgcccaccacttggacgactcgaccatcagcggtctgaacgtcaagaacacccccgttcagggtttcagtatcctggctgaccgcctgaccctcgaccacatcaccatcgacaacagcgagggtgatgccaagggtggccacaacaccgatgccttcgatgttggctccagtaccttcatcaccatctccaacgccaacatcaagaaccaggatgactgcctggctatcaactctggctcgaacatcaagttcgttggcggcacctgctccggcggccacggtatctccatcggttccgttggcttgcgcgacaacaacatcgtgaaggatgtcaccatctctgactctaccgtcatcaactccgacaacggtgtccgcgtcaagaccatctaccaggccaccggtgctgtctccggcgtcactttctccaacatcaagctgtccaacatcgccaagtacggtatcgtcatcgagcaggattacgagaacggcagccctaccggcaagcccaccaacggtgtccccatctctgagctcaccattgagaacgttaccggtaccctcaagagcagcgctactgaagtttacattctctgcggtaacggtagctgcaagaactggaaatgggctggaaactctctctctggtggtaagaagagtggcaagtgcggtaacgtgcctgccggtgcttcttgctag

SEQ ID NO: 7603 - protein, 367 aa, Penicillium digitatum
MRTSFVTMLALGAAAVSAAPAAPVTDLVERGSSCTFTTAEAAKAGKGSCSTIVLDNIKVPAGETLDLTKLKSGTQVVFKGETSFGYKEWTGPLVSFSGSNIHVSGAAGHVINGGGPSWWDGKGTNGGKKKPKFFYAHHLDDSTISGLNVKNTPVQGFSILADRLTLDHITIDNSEGDAKGGHNTDAFDVGSSTFITISNANIKNQDDCLAINSGSNIKFVGGTCSGGHGISIGSVGLRDNNIVKDVTISDSTVINSDNGVRVKTIYQATGAVSGVTFSNIKLSNIAKYGIVIEQDYENGSPTGKPTNGVPISELTIENVTGTLKSSATEVYILCGNGSCKNWKWAGNSLSGGKKSGKCGNVPAGASC

SEQ ID NO: 7604 - DNA, 1137 bp, Penicillium expansum
  CDS (1)..(1137)
atgatcttgacacgcagtgttgttctgggatttctgggctcagcgtccttggccctcgcctctccggttgccgaactggctgaagggagcagactcacccctcgtggatctgcatgcagctattcgggaaccagtggtgcagcagcagcgatagctggaaaggcaggttgctccagtattactctcaacaacgttgtagtgcctgccgggactacgctggatttgactggtctggcctcgggtaccaaggtgatttttgagggaaccactactttcggctataagcagtgggctggccctctgatctccatctctggaaccaacatccaagtttctggagcttccggtcacctcatcgatggccaaggttcccgctggtgggatggagagggttccaacagcaagaccaacatcaagcctaagttcttcttcgcccacagtctcaagggatcctccactatcaccgggttgaacatcaaggattctcccgttcaggtcttcagcatctctggctcgtccggtctcacaatcagtggtgtcacaattgacaacaagaatggtgatacgaactctcttggtcacaataccgatgggttcgatatcggcgacagtgatagcattaccatcactggtgctacggtttataaccaagacgactgccttgctatcaattctggaacgaacattgtcttttccgggggttactgctctggtgggcacggattgtctatcggctcagtcggtggccgttccaataatgtggtagagaccgtccatatcagcagcacccaggtcgtcaactctcagaatggtgtccgtgtcaaggctgtctctggtgccaccggtactatcaaaggcgtgactttccaggatattaccctctccggcattacgagccagggtatcaccatccgccaagaatacaccaactctggctacactggaagccccacgaccggggttccaatcactggtctcaccttgaacaatgtgcacggcacggtcacatccaagggtaccgatatcaccatcgagtgtggaagttctgccagttgctcaggctggacttggactaaggttgcagtgtctggcggtaaggcggatgtgtgcaagaatgcaccttccggcacttgttaa

SEQ ID NO: 7605 - protein, 378 aa, Penicillium expansum
MILTRSVVLGFLGSASLALASPVAELAEGSRLTPRGSACSYSGTSGAAAAIAGKAGCSSITLNNVVVPAGTTLDLTGLASGTKVIFEGTTTFGYKQWAGPLISISGTNIQVSGASGHLIDGQGSRWWDGEGSNSKTNIKPKFFFAHSLKGSSTITGLNIKDSPVQVFSISGSSGLTISGVTIDNKNGDTNSLGHNTDGFDIGDSDSITITGATVYNQDDCLAINSGTNIVFSGGYCSGGHGLSIGSVGGRSNNVVETVHISSTQVVNSQNGVRVKAVSGATGTIKGVTFQDITLSGITSQGITIRQEYTNSGYTGSPTTGVPITGLTLNNVHGTVTSKGTDITIECGSSASCSGWTWTKVAVSGGKADVCKNAPSGTC

SEQ ID NO: 7606 - DNA, 1131 bp, Penicillium griseoroseum
  CDS (1)..(1131)
atggcctccagtctcaaacttggcttgattgccctactcggtgcgactgctgtcaacgcagctcccgccgctgagcccgttcttggaacctctctccttacttctcgtgcttcttgtaccttctccggctccagcggtgctgcggaagccatcaagagcaagacctcttgctcaaccattaccctgagcaacgtcgaagtcccggccggaactactctggacctgacaggactcaagtccggtaccaccgtcatcttcgaaggaaccaccaccttcggttacaaggaatgggaaggtcctctggtctccgtctccggaacctccatcaccgtccagggtgcctcaggcgcgcagctcaacggtgatggtgcccgctggtgggacggcaagggaaccaacggcggcaagaccaagcccaagttcttctacgctcacagcttgaccaactccaagatcgagaacatctacatcaagaactcccccgtgcaggtcttcagcatcaacggcgccaaggagctgactcttagcggaatcaccgtcgacaccgctgacggcgatagcaacggcggccacaacaccgacgctttcgacgtcggctccagcaacggtgtctacatcaccagccctatcgtccacaaccaggatgactgcctggctgtcaactccggcactaacgtccacttcactggcgctcagtgcactggcggccacggtatctccatcggctccgtcggtggacgctccgacaacaccgttgacggtgtcaccgtcgagagctgcaccatcaaggactccgacaacggcgtccgcatcaagaccgtctacggcgccaccggtacagtccaaggcgtcacctacaaggacatcactctttccggaattgccaagtacggtatcgtcatcgagcaggattacgagaacggtagccctaccggaacccccaccagcggtgtccccattaccgacttgaccctcgacaacgtccacggaactgtcgccagcagtggtgtcgatacctacatcctgtgtgcttctggtgcttgctccgactggtcttggagcggcgttagcatcaccggtggtcagactagcaagaagtgcaagggtattcccagcggtgctagctgctaa

SEQ ID NO: 7607 - protein, 376 aa, Penicillium griseoroseum
MASSLKLGLIALLGATAVNAAPAAEPVLGTSLLTSRASCTFSGSSGAAEAIKSKTSCSTITLSNVEVPAGTTLDLTGLKSGTTVIFEGTTTFGYKEWEGPLVSVSGTSITVQGASGAQLNGDGARWWDGKGTNGGKTKPKFFYAHSLTNSKIENIYIKNSPVQVFSINGAKELTLSGITVDTADGDSNGGHNTDAFDVGSSNGVYITSPIVHNQDDCLAVNSGTNVHFTGAQCTGGHGISIGSVGGRSDNTVDGVTVESCTIKDSDNGVRIKTVYGATGTVQGVTYKDITLSGIAKYGIVIEQDYENGSPTGTPTSGVPITDLTLDNVHGTVASSGVDTYILCASGACSDWSWSGVSITGGQTSKKCKGIPSGASC

SEQ ID NO: 7608 - DNA, 1116 bp, Penicillium janthinellum
  CDS (1)..(1116)
atgccttcctatctccggaatttggtctgggctaccctggctgccggcctggtgtctgcggctcccaccccttcgcgtgtttcggatctgaccaagaagtcgtcctccacctgcaccttctcctcggctgctagtgccagcgccagcaagtcctcctgctccacgattgttctgagtaacattgaggtgcctgcgggtaaaacactcgatctgacggacctgaaggacggaaccaaggtcatcttcgaaggcaccactacgttcggttacaaggagtggagcggtcctctcatcaagatctctggatccgatatcaccgtcgaggctgccgatggcgctgtaattaacgctgacggttcccgttggtgggatggagagggcaccaatggaggcaagaccaagcccaagttcttctatgcccactcgttggacgactcgaccatctcgggcctcaatatcaagaacacccccgtgcaggctttcagcatccagtctgacaatcttatcattgatggagttactattgacaattcggacggtgacgaaaatggcggccacaacaccgacggctttgatatcagcgagtccacaggcgttactatcaggaacgcggttgtcaagaaccaggatgactgcattgcaatcaactccggccagaacatctacttcaccggaggtacctgctctggcggccatggtctctcgattggctccgtcggtggtcgtgatgataacaccgtgaagaacgtgacgatcacagattccaccgtgacagattccgccaacggagttcgcatcaagaccgtttacgatgctactggctctgttagcgacgtgactttttccgacatcacggtctctggtattaccgactatggcattgtgattgagcaggactacgagaacggttctccgaccggcactcctaccagcggtgttccgatcacagatttgactgtcaagggcatcactggctcagtggaatccgatgcagttgaagtgtatatcctgtgtggtgacgatgcctgcagcgactggacctggagcggcgtggacatcaccagtggacagaccagcagcaaatgcgagaatgtcccctctggcgcgtcgtgctga

SEQ ID NO: 7609 - protein, 371 aa, Penicillium janthinellum
MPSYLRNLVWATLAAGLVSAAPTPSRVSDLTKKSSSTCTFSSAASASASKSSCSTIVLSNIEVPAGKTLDLTDLKDGTKVIFEGTTTFGYKEWSGPLIKISGSDITVEAADGAVINADGSRWWDGEGTNGGKTKPKFFYAHSLDDSTISGLNIKNTPVQAFSIQSDNLIIDGVTIDNSDGDENGGHNTDGFDISESTGVTIRNAVVKNQDDCIAINSGQNIYFTGGTCSGGHGLSIGSVGGRDDNTVKNVTITDSTVTDSANGVRIKTVYDATGSVSDVTFSDITVSGITDYGIVIEQDYENGSPTGTPTSGVPITDLTVKGITGSVESDAVEVYILCGDDACSDWTWSGVDITSGQTSSKCENVPSGASC

SEQ ID NO: 7610 - DNA, 1266 bp, Brassica napus
  CDS (1)..(1266)
atggctagcgcaagaagtttggttgccaaggcaaataatactaatgtaggctcattaatcttaatggccttggtgttaggttcttgcgtagctaatggtgaatatctcggtggccgccgtggccttgccgctgttgccggcaaccctacggtctttgatattactaagaatggagcagtgggaaatggtgccaccgattcttccaaggcgtttctaaacacatggctccaagtgtgtgccagtcctgtaccagcaacgctactagtccctaaaggagatttcttggctggtccagtaatttttgctggtccatgcaagagcaaagtgaccgtcgaagttcagggcacaatcatcgctccaccaagcggatacccgactcctgaatggttcttattcgaacatgtcgataatgtcgtcctcaccggacccggcacattccacggcaaaggtgaagccgtttggaaagcagatggctgtggtaaaaagttgaactgcaatcttcctccaacgtctctaaaattcagaaacattttaaaccttgacatttccggcattagctcggtcaacgcaaaggccttccacatgttcttggtaaaaactacaaatgtcaacgtccaaaacatcaagattactgcccctgctgaaagtcccaacaccgatggcatccatttgagcaatgcggtcaacgttcatatcgctgacagtttaatagctacaggagacgattgtatctcagtcggtcgtggttccaccaatgtaaccgtcgaacgcgtgacttgtggcccaggacacggcctaagtgtcggtagtcttggtaagtacccgaacgaggagaatgttgccggcattcactttaagaagtgcaccatgaaagataccgacaatggtcttagaatcaagagttggggtggttcgtctccaagcacggctgtggacatcacctatgaagatattatgatgacaaacgtcaagaacccaatcatcattgaccaaaactacggctcaagaggcggagattcaaaagttgcgataagcaatgtgctgttcaagaacgtaagaggaacaacaattacaaaagatgaagttcagttcatgtgcagcaaatcagtaccgtgcaaaggagtcagcgtcgttgacgtggaattgaacttcgtaggtgacaaaggaggacacccctcgtcgtcaggaggtttggtcggagctctttgtaccaacgccaatgttatcttcggtggaaaacttagcttccctctgtgtcccaaataa

SEQ ID NO: 7611 - protein, 421 aa, Brassica napus
MASARSLVAKANNTNVGSLILMALVLGSCVANGEYLGGRRGLAAVAGNPTVFDITKNGAVGNGATDSSKAFLNTWLQVCASPVPATLLVPKGDFLAGPVIFAGPCKSKVTVEVQGTIIAPPSGYPTPEWFLFEHVDNVVLTGPGTFHGKGEAVWKADGCGKKLNCNLPPTSLKFRNILNLDISGISSVNAKAFHMFLVKTTNVNVQNIKITAPAESPNTDGIHLSNAVNVHIADSLIATGDDCISVGRGSTNVTVERVTCGPGHGLSVGSLGKYPNEENVAGIHFKKCTMKDTDNGLRIKSWGGSSPSTAVDITYEDIMMTNVKNPIIIDQNYGSRGGDSKVAISNVLFKNVRGTTITKDEVQFMCSKSVPCKGVSVVDVELNFVGDKGGHPSSSGGLVGALCTNANVIFGGKLSFPLCPK

SEQ ID NO: 7612 - DNA, 1263 bp, Brassica napus
  CDS (1)..(1263)
atggctaacgcaagaatgttagccgctaaggcaaataacactaatattggttcattcattataatggccttggtacttggttcttgcgtggctaacggtgaatatcttggaggcggccgtgaacttactggcaaccctaccgtatttgatataactcagtttggagcagtgggagatggtcgcaccaatactttcaaggcgtttttgaaagcatggatccaagtgtgtgcaagtcctgtaccagcaacgctactagtccctaaaggaaatttcttggctggtccaattattttcgccggtccatgcaaaagcaaagtgaccgtcaatgttcaaggcacgatcagtgctacaacaagcggattcgcaacccctgaatggatcttatttgagcgtgtcgacaatgtccacctcaccggacctggcataattcacggaagaggtgaagcagtatgggcagcagatggttgtggcaaaaagtttaaatgcaatcttcccccaacgtctctaaaattcagaaacatagtaaatcttgaagtcagcggcattagctcggtcaacgcaaaggccttccacatgttcttggtgaaaaccgtgaatgtcaacatccacaacattaagattatcgcccctgctgaaagtcccaacaccgatggtatccatttgagcaatgccgacaacgttaggatcctagacagttttatagggaccggagacgattgtgtttcagtcggtcgtggttccaacaatgtaaccgtcgaacgtgtggtttgtggccctggacacggcctcagtgttggtagtcttggtaagtaccccaacgaggaggacgttagcggcattcactttaggaactgcacaatgagaaataccgacaatggtcttagaatcaagagttggggtggttcgacaccaagcaaggctgtggacattcattttgaagatattatcatggaaaacgtcaagaacccaatcatcattgaccaaaactatggttcaagaggcggggagtcaagagttgccataagcgatgtgttgttcaagggtgtaaaaggaacaacaattacaaaagattttgttcagttcatgtgcagcaaatcggtaccgtgtaaaggagtcagagtcgacgatgttaaattaagcttcgtaggccacaaaggaggacatccatcggcgtcaggtggtttgatcggatctctttgtaataacgccggtgttgtatttggtggaagggttaacttccctctgtgcccaaatcaaaaataa

SEQ ID NO: 7613 - protein, 420 aa, Brassica napus
MANARMLAAKANNTNIGSFIIMALVLGSCVANGEYLGGGRELTGNPTVFDITQFGAVGDGRTNTFKAFLKAWIQVCASPVPATLLVPKGNFLAGPIIFAGPCKSKVTVNVQGTISATTSGFATPEWILFERVDNVHLTGPGIIHGRGEAVWAADGCGKKFKCNLPPTSLKFRNIVNLEVSGISSVNAKAFHMFLVKTVNVNIHNIKIIAPAESPNTDGIHLSNADNVRILDSFIGTGDDCVSVGRGSNNVTVERVVCGPGHGLSVGSLGKYPNEEDVSGIHFRNCTMRNTDNGLRIKSWGGSTPSKAVDIHFEDIIMENVKNPIIIDQNYGSRGGESRVAISDVLFKGVKGTTITKDFVQFMCSKSVPCKGVRVDDVKLSFVGHKGGHPSASGGLIGSLCNNAGVVFGGRVNFPLCPNQK

SEQ ID NO: 7614 - DNA, 1302 bp, Brassica napus
  CDS (1)..(1302)
atggcccgttgtcatggaagtcttgctattttcttatgcgttcttttgatgctcgcttgctgccaagctttgagtagcaacgtagatgatggatatggtcatgaagatggaagcttcgaaaccgatagtttaatcaagctcaacaacgacgacgacgttcttaccttgaaaagctccgatagacccactaccgaatcatcaactgttagtgtttcgaacttcggagcaaaaggtgatggaaaaaccgatgatactcaggctttcaagaaagcatggaagaaggcatgttcaacaaatggagtgactactttcttgattcctaaagggaagacttatctccttaagtctattagattcagaggcccatgcaaatcattacgtagcttccagatcctaggcactttatcagcttctacaaaacgatcggattacagtaatgacaagaaccactggcttattttggaggacgttaataatctatcaatcgatggcggctcggcggggattgttgatggcaacggaaaaatctggtggcaaaactcatgcaaaatcgacaaatctaagccatgcacaaaagcgccaacggctcttactctctacaacctaaacaatttgaatgtgaagaatctgagagtgagaaatgcacagcagattcagatttcgattgagaaatgcaacaatgttgatgttaagaatgttaagatcactgctcctggcgatagtcccaacacggatggtattcatatcgttgctactaaaaacattcgaatctccaattcagacattgggacaggtgatgattgcatatccattgaggatggatcgcaaaatgttcaaatcaatgatttaacttgcggccccggtcatggcatcagcattggaagcttgggggatgacaattccaaagcttatgtatcgggaattaatgtggatggtgctacgctctctgagactgacaatggagtaagaatcaagacttaccagggagggtcaggaactgctaagaacattaaattccaaaacattcgtatggataatgtcaagaatccgatcataatcgaccagaactactgcgacaaggacaaatgcgaacaacaagaatctgcggttcaagtgaacaatgtcgtgtatcggaacatacaaggtacgagcgcaacggatgtggcgataatgtttaattgcagtgtgaaatatccatgccaaggtattgtgcttgagaatgtgaacatcaaaggaggaaaagcttcttgcaaaaatgtcaatgttaaggataaaggcaccgtttctcctaaatgcccttaa

SEQ ID NO: 7615 - protein, 433 aa, Brassica napus
MARCHGSLAIFLCVLLMLACCQALSSNVDDGYGHEDGSFETDSLIKLNNDDDVLTLKSSDRPTTESSTVSVSNFGAKGDGKTDDTQAFKKAWKKACSTNGVTTFLIPKGKTYLLKSIRFRGPCKSLRSFQILGTLSASTKRSDYSNDKNHWLILEDVNNLSIDGGSAGIVDGNGKIWWQNSCKIDKSKPCTKAPTALTLYNLNNLNVKNLRVRNAQQIQISIEKCNNVDVKNVKITAPGDSPNTDGIHIVATKNIRISNSDIGTGDDCISIEDGSQNVQINDLTCGPGHGISIGSLGDDNSKAYVSGINVDGATLSETDNGVRIKTYQGGSGTAKNIKFQNIRMDNVKNPIIIDQNYCDKDKCEQQESAVQVNNVVYRNIQGTSATDVAIMFNCSVKYPCQGIVLENVNIKGGKASCKNVNVKDKGTVSPKCP

SEQ ID NO: 7616 - DNA, 1263 bp, Brassica napus
  CDS (1)..(1263)
atggctggcgcaagaagtttggtcaaggcaaatcatactaatgtaggctcattaattttaatggccttggtgtttggttcttgcgtagctaatggtgagtatctcagtgaccgccgtggtcttgtcgctgttgccggcaaccctacggtctttgatattactaagtttggagcagtgggaaatggtgccaccaattctttcaaggcgtttttaaatgcatggctccaagtgtgtgccagtcctgtaccagcaacgctactagtccctaaaggagagttcttgactggtccagtaatttttgctggtccatgcaaaagcaaagtgaccatcgaagttcaaggcacaatcaccgctacaccaagcggatacgcgacccctgaatggttcttattcgagcatgtcgacaatgtcctcctcaccggacccggcacattccacggcaaaggtgaagccgtatggaaagcagatggctgtggcaaaaaggtcgactgcaatcttcctccaacgtctctaaaattcagaaacatcttaaatcttgaaattgccggcattagctcggtcaacgcgaaggccttccacatgttcttggtgaaaactacaaatgtcaacattcacaacatcaacattattgcccctgctgaaagtcccaacaccgatggtatccatttgagcaatgcggtcaacgttaacatcgttcagagtacaataggaacaggagacgattgtatctctgtcggtcgtggttccaccaatgtaacagtcgaacacgtgacttgtggcccaggacacggactaagtgttggtagtctcggaaagtacccgcacgaggaggatgttagcggcattcactttaagagctgcacgatgaaaggtaccgacaacggtctaagaatcaagagttggggtggttcgtctccaagcaaggctgtggacattaagtttgaagatattacaatggaaagcgtcaagaacccaatcatcattgaccaaaactacggctcaagaggcggagattcaaaggttgcgataagcgatgtgttgttcaagaacgtaagaggaacaacaattactaaagatgaagtccagatcatgtgcagcaaatcagtaccatgcacaggagtcagcgtcattgacgtgaacttgaacttcgtaggtgataaaggaggacatccttcggcgtcaggaggcttgatcggagctctttgcaccaacgccaatgttatcttcggtggaaagcttagcttccctatgtgtcccaaataa

SEQ ID NO: 7617 - protein, 420 aa, Brassica napus
MAGARSLVKANHTNVGSLILMALVFGSCVANGEYLSDRRGLVAVAGNPTVFDITKFGAVGNGATNSFKAFLNAWLQVCASPVPATLLVPKGEFLTGPVIFAGPCKSKVTIEVQGTITATPSGYATPEWFLFEHVDNVLLTGPGTFHGKGEAVWKADGCGKKVDCNLPPTSLKFRNILNLEIAGISSVNAKAFHMFLVKTTNVNIHNINIIAPAESPNTDGIHLSNAVNVNIVQSTIGTGDDCISVGRGSTNVTVEHVTCGPGHGLSVGSLGKYPHEEDVSGIHFKSCTMKGTDNGLRIKSWGGSSPSKAVDIKFEDITMESVKNPIIIDQNYGSRGGDSKVAISDVLFKNVRGTTITKDEVQIMCSKSVPCTGVSVIDVNLNFVGDKGGHPSASGGLIGALCTNANVIFGGKLSFPMCPK

SEQ ID NO: 7618 - DNA, 1209 bp, Glycine max
  CDS (1)..(1209)
atgaagttcctatttgctgtgctagcaatttttgttgttgctttaccttgtgcgtggactaaactggagcttgatgcaggtcctagcttcaatgttatcgattatggtgccacgggcaatggtcaaactgatgattcccaagcttttctgaaagcatggaaagacgcgtgtaatgcaagttatggcaccgcaacacttctcatacccaaagagaaaactttcatgttacaaccggtgttgttccgtggtccttgcaagcctccaaccgttcacattaagctcaagggaaccatcattgccccaaacaagattgaggcttggaaattgccaaaaagtacaaggatggcatggattcgttttaggcacataagtggtcttgttatccgtggagggggatggggactaattgatggtcaagggtctccatggtggaattcttatttcaataccgaaattaagaggccaactgctttacattttcgtgaatgtgactatctatttcttagtggattgactcacattaacagtcccaaaaatcatataagcataaatagatgcaacaactcactcatctccaaaattcatatgattgccccagacgaaagcccaaacactgatgggattgatatctcacagtcatccaacattgtcataaagaattctaagatggaaactggtgatgattgcattgccattaaccatggatccaccttcatcagcataattggtgtcttttgtggaccaggccatggcatcagtattgggagcttaggaaaaaatggagcccatcaaacagtggaagaaatatatgtacgaaattgcaccttcaatagaacaacaaatggagctagaatcaaaacatggataggaggtcaagggtatgcaaggaagatcacttttaaggatattatacttatggaagctacaaatcctgtgattattgatcaacaatacaacccatatgacaatgtaggtggagtgagagtgagtgatgttagttaccacaatgtgaggggaacctcaagttccatgcatgcaatcaaactgcattgtgacaaaagcgtaggttgcaccaacattgaattgaaagggattaacataactaccattactggaaagaaaacttatgcatcatgcaaaaatgtaaaaggggtgtgctctttttgtaatccacatgtgtcatgtctttctcataaaggatcaaattag

SEQ ID NO: 7619 - protein, 402 aa, Glycine max
MKFLFAVLAIFVVALPCAWTKLELDAGPSFNVIDYGATGNGQTDDSQAFLKAWKDACNASYGTATLLIPKEKTFMLQPVLFRGPCKPPTVHIKLKGTIIAPNKIEAWKLPKSTRMAWIRFRHISGLVIRGGGWGLIDGQGSPWWNSYFNTEIKRPTALHFRECDYLFLSGLTHINSPKNHISINRCNNSLISKIHMIAPDESPNTDGIDISQSSNIVIKNSKMETGDDCIAINHGSTFISIIGVFCGPGHGISIGSLGKNGAHQTVEEIYVRNCTFNRTTNGARIKTWIGGQGYARKITFKDIILMEATNPVIIDQQYNPYDNVGGVRVSDVSYHNVRGTSSSMHAIKLHCDKSVGCTNIELKGINITTITGKKTYASCKNVKGVCSFCNPHVSCLSHKGSN

SEQ ID NO: 7620 - DNA, 1233 bp, Zea mays
  CDS (1)..(1233)
atggcgtgcacagacaatgcgatgagagccttgttcctcctggtcctcttctgcatcgtgcatggtgagaaggaagagtcaaagggcatcgatgcgaaagcgtccgggcctggtgggtccttcgacatcaccaagttgggcgcctccggcaatggcaagacagacagcacgaaggctgtgcaggaggcatgggcatcggcgtgcggcggcactgggaagcagacaatcctcatacccaagggcgacttccttgtcggacaactcaacttcacaggcccttgcaagggcgacgtgaccatccaggtggatggcaatctgctggcgaccacggacctaagccagtacaaggaacatggtaattggatcgagattctacgcgtggataacctggtcatcaccggcaagggaaaccttgacgggcagggcccagccgtgtggagcaagaactcctgcaccaagaagtacgactgcaagatccttcccaactcgctggtgatggacttcgtgaacaacggggaggtgtccgggatcacgctgctcaactccaagttcttccacatgaacatgtaccagtgcaagaacatgctgatcaaggacgtgaccgtgacggcgcccggggacagccccaacacggatggcatccacatgggcgactcatccgggatcaccatcaccaacaccgtcattggcgtcggcgacgactgcatctccatcggccctgggacctccaaggtgaacatcactggcgtgacctgcggccccggccacggcatcagcatcggcagcctagggcggtacaaggacgagaaggacgtcacggacatcaacgtcaaggattgcactcttaagaagacaatgttcggcgtccgcatcaaggcgtacgaggacgccgcctccgtgctcaccgtctccaagatccactacgagaatatcaagatggaggactcagccaaccccatcttcatcgacatgaagtactgccccaacaagttgtgtactgccaacggcgcctccaaggtcaccgtcaaggacatcaccttcaagaacatcactggcacctcctccaccccggaggccattagcctgctctgcactgccaaggtcccatgcaccggcgtcaccatggatgacgtcaacgtcgagtatagtggcaccaacaacaagaccatggctatatgcacgaacgccaagggcagcaccaagggttgcctcaaggagcttgcatgcttctag

SEQ ID NO: 7621 - protein, 410 aa, Zea mays
MACTDNAMRALFLLVLFCIVHGEKEESKGIDAKASGPGGSFDITKLGASGNGKTDSTKAVQEAWASACGGTGKQTILIPKGDFLVGQLNFTGPCKGDVTIQVDGNLLATTDLSQYKEHGNWIEILRVDNLVITGKGNLDGQGPAVWSKNSCTKKYDCKILPNSLVMDFVNNGEVSGITLLNSKFFHMNMYQCKNMLIKDVTVTAPGDSPNTDGIHMGDSSGITITNTVIGVGDDCISIGPGTSKVNITGVTCGPGHGISIGSLGRYKDEKDVTDINVKDCTLKKTMFGVRIKAYEDAASVLTVSKIHYENIKMEDSANPIFIDMKYCPNKLCTANGASKVTVKDITFKNITGTSSTPEAISLLCTAKVPCTGVTMDDVNVEYSGTNNKTMAICTNAKGSTKGCLKELACF

SEQ ID NO: 7622 - DNA, 1233 bp, Zea mays
  CDS (1)..(1233)
atggcgtgcacaaacaatgcgatgagagccttgttcctcctggtcctcttctgcatcgtgcatggtgagaaggaagagtcaaagggcatcgatgcgaaagcgtccgggcctggtgggtccttcgacatcaccaagttgggcgcctccggcaatggcaagacagacagcacgaaggctgtgcaggaggcatgggcatcggcgtgcggcggcactgggaagcagacaatcctcatacccaagggtgacttccttgtcggacaactcaacttcacaggcccttgcaagggcgacgtgaccatccaggtggatggcaatctgctggcgaccacggacctaagccagtacaaggaccatggtaattggatcgagattctacgtgtggataacctggtcatcaccggcaagggaaaccttgacgggcagggcccagccgtgtggagcaagaactcctgcaccaagaagtacgactgcaagatccttcccaactcgctggtgatggacttcgtgaacaacggggaggtgtccggggtcacgctgctcaactccaagttcttccacatgaacatgtaccggtgcaaggacatgctgatcaaggacgtgaccgtgacggcgcccggggacagccccaacacggatggcatccacatgggcgactcatccgggatcacgatcaccaacaccgtcattggcgtcggcgacgactgcatctccatcggccccgggacctccaaggtgaacatcaccggcgtgacctgcggccctggccacggcatcagcatcggcagcctagggcggtacaaggacgagaaggacgtcacggacatcaacgtcaaggattgcactcttaagaagacgatgttcggcgtccgcatcaaggcgtacgaggacgccgcctccgtgctcaccgtctccaagatccactacgagaatatcaagatggaggactcagccaaccccatcttcatcgacatgaagtactgccccaacaagttgtgtactgccaacggcgcctccaaggtcaccgtcaaggatgtcaccttcaagaacatcaccggcacctcctccaccccggaggccgttagcctgctctgcactgccaaggtcccatgcaccggcgtcaccatggatgacgtcaacgtcgagtatagcggcaccaacaacaagaccatggctatatgcacgaacgccaagggcagcaccaagggttgcctcaaggagcttgcatgcttctag

SEQ ID NO: 7623 - protein, 410 aa, Zea mays
MACTNNAMRALFLLVLFCIVHGEKEESKGIDAKASGPGGSFDITKLGASGNGKTDSTKAVQEAWASACGGTGKQTILIPKGDFLVGQLNFTGPCKGDVTIQVDGNLLATTDLSQYKDHGNWIEILRVDNLVITGKGNLDGQGPAVWSKNSCTKKYDCKILPNSLVMDFVNNGEVSGVTLLNSKFFHMNMYRCKDMLIKDVTVTAPGDSPNTDGIHMGDSSGITITNTVIGVGDDCISIGPGTSKVNITGVTCGPGHGISIGSLGRYKDEKDVTDINVKDCTLKKTMFGVRIKAYEDAASVLTVSKIHYENIKMEDSANPIFIDMKYCPNKLCTANGASKVTVKDVTFKNITGTSSTPEAVSLLCTAKVPCTGVTMDDVNVEYSGTNNKTMAICTNAKGSTKGCLKELACF

SEQ ID NO: 7624 - DNA, 1257 bp, Zea mays
  CDS (1)..(1257)
atggcgttcatcagcagtgcggcgatgaaggcagccgtggccgctctgctggtgttcgccgcggtgtcgcctgccgcgcgcgcggtggcggcggaggcggaggcgaaggcgaaggctgtgggaggcgcgccgtcggtgcccgctggctcgctggacatcgcgcagctgggcgccaagggcgacggcaagtcggacagcaccccgatggtgctcaaggcgtggaagcacgcgtgcgaggcgacggggcagcagaagatcgtcatccccaagggcaactacctgacgggcgcgctggacctggtgggcccctgcaagtcctccatcatcatccgcctcgacggcaacctgctcggcaccggcgacctcaacgcgtacaagaggaactggatcgagatccagaacgtcgacaacctgtccatcaacggccacggcaccatcgacgggcagggagccctggtgtggaacaagaacgagtgccagcgttcctacaactgcaaaatcctccccaacagcctggtgctggacttcgtgacgaacgcccagatccgcggcatcacgctgctgaacagcaagttcttccacatgaacatcttcgggagcaagaacgtggtgatcgacaaggtgacgatcaaggcccccggcaacagccccaacacggacggcagccacatcggcgactcgagcaacgtgaccatcagcggcaccaccatcgccgtcggcgacgactgcgtctccatcggccccgggagcaagaccatccgcgtgaagggcgtcaagtgcggaccgggccacggcatcagcgtcggcagcctggggcggtacaaggacgagaaggacgtggaggacgtgaaggtgacggggtgcacgctcgccggcaccaccaacggcctgcgcatcaagtcgtacgaggactccaagtcgtcgctcaaggccaccaagttcctgtaccaggacgtcaccatggacaacgtctcctaccccatcatcatagaccagaagtactgccccaacaacatctgcgtcaagtccggcgcctccaaggtggccgtcaacgacgtcgtcttcaagaacatccacggcacctccaacacgccggaggccatcacgctcaactgcgccaacaacctgccctgccagggcgtgcagctcatcaacgtcgacatcaagtacaacaggtccgacaacaagaccatgtccgtctgcaagaacgccatcggcaagtccattggcatggcgaaggagctcgcctgcgtctga

SEQ ID NO: 7625 - protein, 418 aa, Zea mays
MAFISSAAMKAAVAALLVFAAVSPAARAVAAEAEAKAKAVGGAPSVPAGSLDIAQLGAKGDGKSDSTPMVLKAWKHACEATGQQKIVIPKGNYLTGALDLVGPCKSSIIIRLDGNLLGTGDLNAYKRNWIEIQNVDNLSINGHGTIDGQGALVWNKNECQRSYNCKILPNSLVLDFVTNAQIRGITLLNSKFFHMNIFGSKNVVIDKVTIKAPGNSPNTDGSHIGDSSNVTISGTTIAVGDDCVSIGPGSKTIRVKGVKCGPGHGISVGSLGRYKDEKDVEDVKVTGCTLAGTTNGLRIKSYEDSKSSLKATKFLYQDVTMDNVSYPIIIDQKYCPNNICVKSGASKVAVNDVVFKNIHGTSNTPEAITLNCANNLPCQGVQLINVDIKYNRSDNKTMSVCKNAIGKSIGMAKELACV

SEQ ID NO: 7626 - DNA, 1233 bp, Zea mays
  CDS (1)..(1233)
atggcgtgtatagacaatgcaatgagagccttgttccttttagcgctcttctgtgtcgtgcatggtgagaaggcaaagtcaaaggacaacgatgcaaaagcgtccgggcccggtgggtccttcgacatcaccaagttgggcgcctccggcaatggcaagacggatagcacgaaggctgtgcaggaggcgtgggcatcggcgtgcggcggcaccgggaagcagacgatcctcatccccaagggcgacttcctcgtcggaccactcaacttcacaggcccatgcaagggcgacgtgaccatccaggtgaatggcaatctgctggcgaccacggacctaagccagtacaaggatcatggtaattggatcgagattctacgcgtggacaaccttgtcatcaccggcaagggaaagctcgacgggcaggggccagccgtgtggagcaagaactcctgcgtcaagaagtacgactgcaagatccttcccaactcgctggtgatggacttcgtgaacaacggggaggtgtccgggatcacgctgctcaactccaagttcttccacatgaacatgtacaagtgcaaggacatgctgatcaaggacgtcaatgtgacggcgcccggggacagccccaacacggacggcatccacatgggcgactcgtccggggtcaccatcaccaacaccgtcatcggcgtcggcgacgactgcatctccatcggccccgggacctccaaggtgaacatcaccggcgtgacctgcggccccggccacggcatcagcatcggcagcctagggcggtacaaggacgagaaggacgtcacggatatcaacgtcaaggactgcacgcttaagaagacggccaacggcgtccgcatcaaggcgtatgaggacgccgcctccgtgctcaccgcctccaagatccactatgagaatatcaagatggaggactcgggctaccccatcatcatcgacatgaagtactgccccaacaagttatgcaccgccaatggtgcctccaaggtcaccgtcaaggacgtcaccttcaagaacatcaccggcacctcctccaccccggaggccgtcaacctgctctgctccgccaagatcccatgcaccggcgtcaccatggacgacgtcaacatcaagtacagtggcaccaacaacaagaccatggccgtatgcaagaacgctaagggcagcgccaagggttgcctcaaggagctcgcatgcttctag

SEQ ID NO: 7627 - protein, 410 aa, Zea mays
MACIDNAMRALFLLALFCVVHGEKAKSKDNDAKASGPGGSFDITKLGASGNGKTDSTKAVQEAWASACGGTGKQTILIPKGDFLVGPLNFTGPCKGDVTIQVNGNLLATTDLSQYKDHGNWIEILRVDNLVITGKGKLDGQGPAVWSKNSCVKKYDCKILPNSLVMDFVNNGEVSGITLLNSKFFHMNMYKCKDMLIKDVNVTAPGDSPNTDGIHMGDSSGVTITNTVIGVGDDCISIGPGTSKVNITGVTCGPGHGISIGSLGRYKDEKDVTDINVKDCTLKKTANGVRIKAYEDAASVLTASKIHYENIKMEDSGYPIIIDMKYCPNKLCTANGASKVTVKDVTFKNITGTSSTPEAVNLLCSAKIPCTGVTMDDVNIKYSGTNNKTMAVCKNAKGSAKGCLKELACF

SEQ ID NO: 7628 - DNA, 28 bp, Artificial sequence
  primer
atgatttctgctaattcattacttattt

SEQ ID NO: 7629 - DNA, 24 bp, Artificial sequence
  primer
ttaacagcttgcaccagatccaga

SEQ ID NO: 7630 - protein, 375 aa, Artificial sequence
  consensus sequence
  Variant (2)..(8): Xaa in position 2 to 8 is any amino acid
  Variant (9)..(10): Xaa in position 9 to 10 is any or no amino acid
  Variant (12)..(14): Xaa in position 12 to 14 is any amino acid
  Variant (16)..(28): Xaa in position 16 to 28 is any amino acid
  Variant (29)..(29): Xaa in position 29 is any or no amino acid
  Variant (31)..(45): Xaa in position 31 to 45 is any amino acid
  Variant (46)..(73): Xaa in position 46 to 73 is any or no amino acid
  Variant (75)..(76): Xaa in position 75 to 76 is any amino acid
  Variant (77)..(77): Xaa in position 77 is any or no amino acid
  Variant (80)..(85): Xaa in position 80 to 85 is any amino acid
  Variant (86)..(94): Xaa in position 86 to 94 is any or no amino acid
  Variant (96)..(113): Xaa in position 96 to 113 is any amino acid
  Variant (114)..(116): Xaa in position 114 to 116 is any or no amino acid
  Variant (118)..(145): Xaa in position 118 to 145 is any amino acid
  Variant (146)..(157): Xaa in position 146 to 157 is any or no amino acid
  Variant (161)..(170): Xaa in position 161 to 170 is any amino acid
  Variant (171)..(171): Xaa in position 171 is any or no amino acid
  Variant (173)..(180): Xaa in position 173 to 180 is any amino acid
  Variant (184)..(188): Xaa in position 184 to 188 is any amino acid
  Variant (190)..(198): Xaa in position 190 to 198 is any amino acid
  Variant (199)..(199): Xaa in position 199 is any or no amino acid
  Variant (201)..(202): Xaa in position 201 to 202 is any amino acid
  Variant (206)..(206): Xaa in position 206 is any amino acid
  Variant (211)..(211): Xaa in position 211 is any amino acid
  Variant (213)..(217): Xaa in position 213 to 217 is any amino acid
  Variant (218)..(222): Xaa in position 218 to 222 is any or no amino acid
  Variant (224)..(235): Xaa in position 224 to 235 is any amino acid
  Variant (236)..(237): Xaa in position 236 to 237 is any or no amino acid
  Variant (240)..(240): Xaa in position 240 is any amino acid
  Variant (244)..(248): Xaa in position 244 to 248 is any amino acid
  Variant (249)..(249): Xaa in position 249 is any or no amino acid
  Variant (251)..(259): Xaa in position 251 to 259 is any amino acid
  Variant (260)..(261): Xaa in position 260 to 261 is any or no amino acid
  Variant (263)..(274): Xaa in position 263 to 274 is any amino acid
  Variant (275)..(275): Xaa in position 275 is any or no amino acid
  Variant (277)..(277): Xaa in position 277 is any amino acid
  Variant (279)..(286): Xaa in position 279 to 286 is any amino acid
  Variant (287)..(309): Xaa in position 287 to 309 is any or no amino acid
  Variant (311)..(319): Xaa in position 311 to 319 is any amino acid
  Variant (320)..(321): Xaa in position 320 to 321 is any or no amino acid
  Variant (323)..(333): Xaa in position 323 to 333 is any amino acid
  Variant (334)..(336): Xaa in position 334 to 336 is any or no amino acid
  Variant (338)..(339): Xaa in position 338 to 339 is any amino acid
  Variant (340)..(342): Xaa in position 340 to 342 is any or no amino acid
  Variant (344)..(359): Xaa in position 344 to 359 is any amino acid
  Variant (360)..(374): Xaa in position 360 to 374 is any or no amino acid
LXXXXXXXXXGXXXFXXXXXXXXXXXXXXGXXXXXXXXXXXXXXXXXXXXXXXXXXXXXXXXXXXXXXXXXXXGXXXWWXXXXXXXXXXXXXXXPXXXXXXXXXXXXXXXXXXXXXNXXXXXXXXXXXXXXXXXXXXXXXXXXXXXXXXXXXXXXXXNTDXXXXXXXXXXXIXXXXXXXXDDCXXXXXGXXXXXXXXXXCXXGHGXSIGSXGXXXXXXXXXXVXXXXXXXXXXXXXXNGXRIKXXXXXXGXXXXXXXXXXXIXXXXXXXXXXXXXQXYXXXXXXXXXXXXXXXXXXXXXXXXXXXXXXXVXXXXXXXXXXXGXXXXXXXXXXXXXXCXXXXXCXXXXXXXXXXXXXXXXXXXXXXXXXXXXXXXC

SEQ ID NO: 7631 - protein, 20 aa, Artificial sequence
  protein pattern
  Variant (2)..(9): Xaa in position 2 to 9 is any amino acid
  Variant (10)..(10): Xaa in position 10 is any or no amino acid
  Variant (14)..(14): Xaa in position 14 is Ile, Leu or Val
  Variant (15)..(15): Xaa in position 15 is Ala or Ser
  Variant (16)..(16): Xaa in position 16 is Ile or Val
  Variant (17)..(17): Xaa in position 17 is Glu, Gly or Asn
  Variant (18)..(18): Xaa in position 18 is any amino acid
  Variant (20)..(20): Xaa in position 20 is Asp, Glu, Asn, Ser or Thr
IXXXXXXXXXDDCXXXXXGX

SEQ ID NO: 7632 - protein, 14 aa, Artificial sequence
  protein pattern
  Variant (2)..(5): Xaa in position 2 to 5 is any or no amino acid
  Variant (8)..(8): Xaa in position 8 is Ala or Gly
  Variant (9)..(9): Xaa in position 9 is Phe or Ile
  Variant (10)..(10): Xaa in position 10 is Asp or His
  Variant (11)..(11): Xaa in position 11 is Ile or Val
  Variant (12)..(12): Xaa in position 12 is Ala, Gly, Asn, Ser, Thr or Val
  Variant (13)..(13): Xaa in position 13 is any amino acid
  Variant (14)..(14): Xaa in position 14 is Asp, Ser, Thr or Val
NXXXXTDXXXXXXX

SEQ ID NO: 7633 - DNA, 312 bp, Saccharomyces cerevisiae; identical to SEQ ID NO: 1334
  CDS (1)..(312)

SEQ ID NO: 7634 - protein, 103 aa, Saccharomyces cerevisiae; identical to SEQ ID NO: 1335

SEQ ID NO: 7635 - DNA, 727 bp, Zea mays
  CDS (84)..(452)
cccacgcgtccgcggacgcgtgggcttgcaatcacaacgaacaaaagctctcgatctcaccgacaccgaggaagaagagatcaatggcgtccgagcagggagtcgtgatcgcgtgccacagcaaggctgagtttgacgcccacatgaccaaggcccaggaagccggcaagctggtggtcattgacttcactgccgcctggtgcggtccatgccgcgccatcgccccactgttcgtcgaacacgccaagaagttcactcaggtcgtcttcctgaaggtggacgtggacgaagtgaaggaagtcaccgcggcctacgaggtcgaggcgatgccgaccttccacttcgtcaagaacggcaagacggtcgcgaccatcgtgggtgccaagaaggacgagctcctggcccagatcgagaagcatgccgcgcctgcgcctgcgtctgcgtctgcctaaaggagatcagatcagtcgtcgccgtcaataagggccagcacgtatggctgtaaatgttgtcgttatcagttctggctttgtcgtttgtgggcgattgtgaactagtagtatgtttgtttctatccgagccggaggcgatacttaaccatggatacttgttgtgagttcgtttctgttcgcgtgtgactcttgaattgaatcaaccagctcaccactgcaccaggccgtggtgagtggtgacagtgatttcctgttaaaaaaaaaaaaaaaaaaaa

SEQ ID NO: 7636 - protein, 122 aa, Zea mays; identical to SEQ ID NO: 1485

SEQ ID NO: 7637 - DNA, 405 bp, Oryza sativa (japonica cultivar-group); identical to SEQ ID NO: 1376
  CDS (1)..(405)

SEQ ID NO: 7638 - protein, 134 aa, Oryza sativa (japonica cultivar-group); identical to SEQ ID NO: 1377

SEQ ID NO: 7639 - DNA, 321 bp, Bombyx mori; identical to SEQ ID NO: 1172
  CDS (1)..(321)

SEQ ID NO: 7640 - protein, 106 aa, Bombyx mori; identical to SEQ ID NO: 1173

SEQ ID NO: 7641 - DNA, 318 bp, Archaeoglobus fulgidus DSM 4304
  CDS (1)..(318): transl_table=11
atggagcgtcttaacagtgagaggtttagggaggtaatccagagcgacaagctggtggtggtggacttctacgccgactggtgcatgccctgcaggtacatctcgccgatacttgagaagctctcgaaggagtacaacggcgaagtggagttctacaagctcaacgtcgatgaaaaccaggatgtggcctttgaatacggcattgcgagcatcccaacagtgctgttcttcaggaacggcaaggttgttggtggattcattggagcgatgcctgaaagtgcggtgagggcggaaatagagaaagcacttggagcctga

SEQ ID NO: 7642 - protein, 105 aa, Archaeoglobus fulgidus DSM 4304
MERLNSERFREVIQSDKLVVVDFYADWCMPCRYISPILEKLSKEYNGEVEFYKLNVDENQDVAFEYGIASIPTVLFFRNGKVVGGFIGAMPESAVRAEIEKALGA

SEQ ID NO: 7643 - DNA, 321 bp, Mesorhizobium loti MAFF303099
  CDS (1)..(321): transl_table=11
atggctaccgtgaaagtcgatataaataacttccagtcggaagttctggaatccgcagcacccgtcgtcgtcgatttctgggccgaatggtgcgatccctgcaagatgattgctccgagcctcgaggaaatctccgtcgagatggaaagcaagatcaaggtcgccaagctcaacatcgatgaaaacccggaactcgccgcccaattgggcgtgcgctccattccggcgctcgcgatcttcaagggcggcgaagtggccgatttctcggtcggcgccaaaccgaagactgctcttttgaactggatttcgaacgctgcctga

SEQ ID NO: 7644 - protein, 106 aa, Mesorhizobium loti MAFF303099
MATVKVDINNFQSEVLESAAPVVVDFWAEWCDPCKMIAPSLEEISVEMESKIKVAKLNIDENPELAAQLGVRSIPALAIFKGGEVADFSVGAKPKTALLNWISNAA

SEQ ID NO: 7645 - DNA, 315 bp, Bacillus halodurans C-125
  CDS (1)..(315): transl_table=11
atggcaattgtaaatgttactgatcaaacgtttgctcaagaaacaagcgaaggtcttgttcttgcagacttctgggcaccgtggtgcggcccttgtaaaatgattgctccagttctagaagaacttgatggggaaatgggcgataaagttaagattgcaaaattggatgtagatgaaaatcaagaaacagcaagcaaattcaatgtaatgagtatcccaacgttgatcgttttcaaagacggtcaagtcgtggatcaagtgactggcttccaaccaaaggacgcattagctgagcttttgaacaaacatctttaa

SEQ ID NO: 7646 - protein, 104 aa, Bacillus halodurans C-125
MAIVNVTDQTFAQETSEGLVLADFWAPWCGPCKMIAPVLEELDGEMGDKVKIAKLDVDENQETASKFNVMSIPTLIVFKDGQVVDQVTGFQPKDALAELLNKHL

SEQ ID NO: 7647 - DNA, 315 bp, Lactococcus lactis subsp. lactis Il1403
  CDS (1)..(315): transl_table=11
atggaatataatattactgatgcaacgtttgatgaagaaacaaaagaagggcttgttttaattgacttttgggcaacttggtgtggtccatgtcgcatgcaagcgccaattttggaacaactttcagaagaacttgacgaatcagaacttaagatttgcaaaatggatgttgatgaaaacccagcaacagcccaaggatttggcattatgtctatcccaacattgatgttcaaaaaagatggtgaagaagtaaaacgcattgttggtgttcaaacaaaagcacaacttaaagccgttattgctgaattatcataa

SEQ ID NO: 7648 - protein, 104 aa, Lactococcus lactis subsp. lactis Il1403
MEYNITDATFDEETKEGLVLIDFWATWCGPCRMQAPILEQLSEELDESELKICKMDVDENPATAQGFGIMSIPTLMFKKDGEEVKRIVGVQTKAQLKAVIAELS

SEQ ID NO: 7649 - DNA, 315 bp, Campylobacter jejuni subsp. jejuni NCTC 11168
  CDS (1)..(315): transl_table=11
atgggaaaatatattgaattaacaagtgataattttgctcaagcaaaagaaggtgtagctttagttgatttttgggctccatggtgcggaccttgtagaatgcttgctccagttattgatgaactttcaaatgacttcgatggtaaagctaaaatttgcaaagtaaatacagatgaacaaggtgatttagcagctgaatttggtgttcgctctattcctacgcttattttctttaaaaatggtgaagttgtagatcaactcgttggtgcacaatctaaacaagcaattagcgataaattaaactctttactataa

SEQ ID NO: 7650 - protein, 104 aa, Campylobacter jejuni subsp. jejuni NCTC 11168
MGKYIELTSDNFAQAKEGVALVDFWAPWCGPCRMLAPVIDELSNDFDGKAKICKVNTDEQGDLAAEFGVRSIPTLIFFKNGEVVDQLVGAQSKQAISDKLNSLL

SEQ ID NO: 7651 - DNA, 315 bp, Streptococcus pneumoniae TIGR4
  CDS (1)..(315): transl_table=11
atggcaaaagcaattacagatgcaacattcgaacaagaaacaaaagacggtttggtcttagtagacttctgggcaacttggtgtggtccatgtcgtatgcaaggtccaatcttggacaaattgtctgaagaactttcagaagatgtcttgaaaatcgttaaaatggacgttgatgaaaatccaaacacagctcgtgcttttggaatcatgtctattccaactcttctcttcaaaaaagacggccaagttgtcaaacaagttgcaggtgttcacacagcagaacaaatcaaggccatcattgctgaattgagctaa

SEQ ID NO: 7652 - protein, 104 aa, Streptococcus pneumoniae TIGR4
MAKAITDATFEQETKDGLVLVDFWATWCGPCRMQGPILDKLSEELSEDVLKIVKMDVDENPNTARAFGIMSIPTLLFKKDGQVVKQVAGVHTAEQIKAIIAELS

SEQ ID NO: 7653 - DNA, 318 bp, Clostridium acetobutylicum ATCC 824
  CDS (1)..(318): transl_table=11
atggtaaaagaaattaatgagtctatttttgatgaagaaataaaaacttcaggagagcctgtaatagttgatttttgggctccatggtgcggaccttgcaaaatgcttggacctataattgatgaattatctgaagatcttgatggtaaagcaaaatttacaaaggttaatgtagatgagaatcctggaatagcaagtaagtttggaatagcaagtatacctacagttatgatatttaaagatggaaatcctgttgaaactttagtaggttttagacctaagcaatcaatcacagcttctatagaaaagcacatgtaa

SEQ ID NO: 7654 - protein, 105 aa, Clostridium acetobutylicum ATCC 824
MVKEINESIFDEEIKTSGEPVIVDFWAPWCGPCKMLGPIIDELSEDLDGKAKFTKVNVDENPGIASKFGIASIPTVMIFKDGNPVETLVGFRPKQSITASIEKHM

SEQ ID NO: 7655 - DNA, 402 bp, Agrobacterium tumefaciens str. C58
  CDS (1)..(402): transl_table=11
gtgagataccggggcattgaaatttcgacgcgcccgcatcacatcgatagcggaaaagatttactgaaaggagagccagatatggctaccgtaaaagtcgatgccgccaacttccagtccgaagtcctcgaatccgccgaacccgtcgtggtggatttctgggccgagtggtgcggtccgtgcaagatgatcgcgccgagccttgaggaaatttcctccgagctggctggcaaggtcaaagttgcgaagctcaacatcgacgaaaacccggagctggccgctcagttcggcgttcgctcgatcccgacgcttgccatattcaagggtggcgaagtggctgatatcaaggtaggtgctgcacccaagacagcgctttccgcctggatttccagcgctgcttaa

SEQ ID NO: 7656 - protein, 133 aa, Agrobacterium tumefaciens str. C58
MRYRGIEISTRPHHIDSGKDLLKGEPDMATVKVDAANFQSEVLESAEPVVVDFWAEWCGPCKMIAPSLEEISSELAGKVKVAKLNIDENPELAAQFGVRSIPTLAIFKGGEVADIKVGAAPKTALSAWISSAA

SEQ ID NO: 7657 - DNA, 423 bp, Sulfolobus tokodaii str. 7
  CDS (1)..(423): transl_table=11
atgacgagtaaagataaaattagtatgacaactgagaaagaccctgaattaggaaaattgctagagaagaaagccaaagaacttatgagccaaaagcctaaaggagaagtaattcatttagatagtaaaaactttgactctttcttagcttcgcacaaaatcgcagtagttgatttttgggcagagtggtgtgcaccatgtttaatccttgcacccataattgaggaattagcagaagattatccacaagttggatttggaaagttaaacagcgacgaaaatccagatattgccgcaagatatggtgtcatgagtctacctacagttatcttctttaaagatggtgaaccagtagatgaaattataggtgctgttccaagagaagaaatagagataagaattaagaatttattaggtgaataa

SEQ ID NO: 7658 - protein, 140 aa, Sulfolobus tokodaii str. 7
MTSKDKISMTTEKDPELGKLLEKKAKELMSQKPKGEVIHLDSKNFDSFLASHKIAVVDFWAEWCAPCLILAPIIEELAEDYPQVGFGKLNSDENPDIAARYGVMSLPTVIFFKDGEPVDEIIGAVPREEIEIRIKNLLGE

SEQ ID NO: 7659 - DNA, 324 bp, Sinorhizobium meliloti 1021
  CDS (1)..(324): transl_table=11
atggctactgtgaaagtcgatactgccaattttcagaaagaagttctgaactcggccgaaccggtcgtcgtcgacttctgggcggaatggtgcggcccgtgcaagatgattgcgccgagcctcgaagaaatcgccaccgagcttgccggcaaggtcaaggtcgtcaagctcaatatcgacgaaaaccccgagctcgcggcgcaatacggggtccgctcgatcccgacgcttgccatgttcaagggcggcgaagtcgccgacatcaaggtcggcgccgcaccgaagacggcgctcagctcgtggatttcgaacgcggtggcttga

SEQ ID NO: 7660 - protein, 107 aa, Sinorhizobium meliloti 1021
MATVKVDTANFQKEVLNSAEPVVVDFWAEWCGPCKMIAPSLEEIATELAGKVKVVKLNIDENPELAAQYGVRSIPTLAMFKGGEVADIKVGAAPKTALSSWISNAVA

SEQ ID NO: 7661 - DNA, 321 bp, Agrobacterium tumefaciens str. C58
  CDS (1)..(321): transl_table=11
atggctaccgtaaaagtcgatgccgccaacttccagtccgaagtcctcgaatccgccgaacccgtcgtggtggatttctgggccgagtggtgcggtccgtgcaagatgatcgcgccgagccttgaggaaatttcctccgagctggctggcaaggtcaaagttgcgaagctcaacatcgacgaaaacccggagctggccgctcagttcggcgttcgctcgatcccgacgcttgccatattcaagggtggcgaagtggctgatatcaaggtaggtgctgcacccaagacagcgctttccgcctggatttccagcgctgcttaa

SEQ ID NO: 7662 - protein, 106 aa, Agrobacterium tumefaciens str. C58
MATVKVDAANFQSEVLESAEPVVVDFWAEWCGPCKMIAPSLEEISSELAGKVKVAKLNIDENPELAAQFGVRSIPTLAIFKGGEVADIKVGAAPKTALSAWISSAA

SEQ ID NO: 7663 - DNA, 315 bp, Clostridium perfringens str. 13
  CDS (1)..(315): transl_table=11
atggtaaaacatataaatgatcaagattttaatacagaagtaatagaagcaagtgaagtagtagttgttgatttctgggcaacttggtgtggaccttgtaaaatgatagcaccagttatagaagaattagcaaatgaaatggaaaatgttaagtttgtaaaggttgatgttgataaaaacccaggttcagctggaaaatatcaaatacaaagcataccaactttattaatatttaaagatggaaaagttgttgatactttagttggctttagaccaaaggctgcattagttgaagctatcaaaaaatacgtttaa

SEQ ID NO: 7664 - protein, 104 aa, Clostridium perfringens str. 13
MVKHINDQDFNTEVIEASEVVVVDFWATWCGPCKMIAPVIEELANEMENVKFVKVDVDKNPGSAGKYQIQSIPTLLIFKDGKVVDTLVGFRPKAALVEAIKKYV

SEQ ID NO: 7665 - DNA, 873 bp, Schizosaccharomyces pombe 972h-
  CDS (1)..(873)
atgtcagttattgaaattagatcgtaccagcactggatctcaacgatccctaagtccggatatcttgcagttgattgctatgccgattggtgtggtccttgcaaagcaatttctcccttattttcacaattagcatcgaaatatgctagccccaaattcgtttttgctaaagtaaatgtagacgagcaacgtcaaattgcctccgggcttggcgtcaaagcaatgcctacatttgttttctttgaaaatggcaaacaaattgatatgctaactggagcaaacccacaagctttgaaggaaaaagttgctttgatttcctcaaaagccacaggaactggcgctcttgcttcttcgtcatcggcacctgtcaagggttttgctagcttgcaaggctgcattgaaaatccccaattggaatgtctaaatcaacaagatgatcacgatttgaaaagtgcatttaacagtaatccttcctcatttttagagtcggatgttgacgagcaattaatgatatacataccttttcttgaagtggtaaaggttcattctattgcaattactcctgttaagggagaaacttcgagtgctccaaaaaccatcaaattgtacatcaatcagcccaacaatctttcttttgaagatgctgagtcatttactccaactcaagtcattgaggatatagtttacgaacaagacgatcaacctacaattattccccttcgttttgttaaatttcaacgtgtcaattctctcgttatttttatttattcgaatgtcggagaagaagaaactactaagatttctcgcttagaattatttggtgagcctgttggtgattcaagtaaaggaaaactacaaaaggtcgaagcttag

SEQ ID NO: 7666 - protein, 290 aa, Schizosaccharomyces pombe 972h-
MSVIEIRSYQHWISTIPKSGYLAVDCYADWCGPCKAISPLFSQLASKYASPKFVFAKVNVDEQRQIASGLGVKAMPTFVFFENGKQIDMLTGANPQALKEKVALISSKATGTGALASSSSAPVKGFASLQGCIENPQLECLNQQDDHDLKSAFNSNPSSFLESDVDEQLMIYIPFLEVVKVHSIAITPVKGETSSAPKTIKLYINQPNNLSFEDAESFTPTQVIEDIVYEQDDQPTIIPLRFVKFQRVNSLVIFIYSNVGEEETTKISRLELFGEPVGDSSKGKLQKVEA

SEQ ID NO: 7667 - DNA, 342 bp, Xanthomonas axonopodis pv. citri str. 306
  CDS (1)..(342): transl_table=11
gtgagcgataaggttcaacatgtcggcgatgccgacttcgacacagctgtactgcaagcgggcgaaccggttctggtggatttctgggccgagtggtgcggcccatgcaagatgatcgccccggtgctggacgatctggccgacacctatcagggccgcctcaaggtcgccaaggtcaatgtggaccagaaccgtgcgctggccatcaagtaccacgtgcgctcgattccgatgctgttgctgttcaaggacgggcaggtgcaggcgacccagatcggtgccgtcggcaagggccagctgacccagatgatcgacaagaccctgggtggcgcggccgcctga

SEQ ID NO: 7668 - protein, 113 aa, Xanthomonas axonopodis pv. citri str. 306
MSDKVQHVGDADFDTAVLQAGEPVLVDFWAEWCGPCKMIAPVLDDLADTYQGRLKVAKVNVDQNRALAIKYHVRSIPMLLLFKDGQVQATQIGAVGKGQLTQMIDKTLGGAAA

SEQ ID NO: 7669 - DNA, 420 bp, Drosophila melanogaster
  CDS (1)..(420)
atggctgccatgcagaagaaggtcatcattgtggattcgaagagttactttgataagctcatcgatgatgcgggaaccaacaaatacgtacttgtcgagttcttcgccacctggtgtggtccttgcgcgatgattggtccccgcttggagcaactggcatcggattacttcggacggatgttggtccttaagattgacgttgatgagaacgaagatctggccgttcagtacgaagtcaacagcatgcccacatttctgatcatcaaaaaccgagtgacactaatccagttcgtgggcggcaatgtcgaaagggtcgtcagcacggtggagaagtttgtgggcaaggtggaggactccaaggagcacaagtcgaaagagggaggtgctagttcagctaccgtgccgaaattggaacgctaa

SEQ ID NO: 7670 - protein, 139 aa, Drosophila melanogaster
MAAMQKKVIIVDSKSYFDKLIDDAGTNKYVLVEFFATWCGPCAMIGPRLEQLASDYFGRMLVLKIDVDENEDLAVQYEVNSMPTFLIIKNRVTLIQFVGGNVERVVSTVEKFVGKVEDSKEHKSKEGGASSATVPKLER

SEQ ID NO: 7671 - DNA, 324 bp, Thermosynechococcus elongatus BP-1
  CDS (1)..(324): transl_table=11
atgtccagtgcattgtcggttacagatgccacctttgaagaagaagtattaaatagcgatattcctgtgttagtggatttctgggcaccttggtgtgggccgtgccgcatggtggcacccgttgttgatgaaatcgccaatgagtatcagggcagagtcaaggtcgtcaaggtcaatactgacgaaaactctaaggtggcgactgattttggcattcgcagtatcccgacgctgatgatttttaagggcggccaaaaggtggatattttggtcggcgcagtgccaaaaaccaaaattgaggccactcttgcacagttcctgtag

SEQ ID NO: 7672 - protein, 107 aa, Thermosynechococcus elongatus BP-1
MSSALSVTDATFEEEVLNSDIPVLVDFWAPWCGPCRMVAPVVDEIANEYQGRVKVVKVNTDENSKVATDFGIRSIPTLMIFKGGQKVDILVGAVPKTKIEATLAQFL

SEQ ID NO: 7673 - DNA, 315 bp, Oceanobacillus iheyensis HTE831
  CDS (1)..(315): transl_table=11
atggctattaagcatgtaactgatcaaaactttacagaagaaacttcaaaaggtcttgtattggctgatttttgggcaccgtggtgtggaccttgtaaaatgattgcaccagtactagaagaaattgatggtgagatggaagaaaaagtacaaattgttaaattagatgtagatgaaaatcaagaaactgcaggtaaatttggagtaatgagcatcccaacattactattattcaaagatggggatgtagtggatcaagttattggattccagccgaaagaagcattagaggatcttataaacaaacacgcgtaa

SEQ ID NO: 7674 - protein, 104 aa, Oceanobacillus iheyensis HTE831
MAIKHVTDQNFTEETSKGLVLADFWAPWCGPCKMIAPVLEEIDGEMEEKVQIVKLDVDENQETAGKFGVMSIPTLLLFKDGDVVDQVIGFQPKEALEDLINKHA

SEQ ID NO: 7675 - DNA, 315 bp, Streptococcus mutans UA159
  CDS (1)..(315): transl_table=11
atgacaaaagtagttacagatgcaacttttgaagctgaaacggctaagggacttgtacttgttgatttttgggcaacatggtgtggtccatgtcttatgcaggcgccaattttggaacagctttcagaagaattagatgaagatgaactcaaaattgttaagcttgatgtggatgaaaatcctaatacagcacaaaattttggcatcatgtcgattccaactttgctttttaaaaaggatggcgaagttgtcaaacaagttgcaggtgttcatacgaaagatcaaattaaggctattgtagccgaacttgcatag

SEQ ID NO: 7676 - protein, 104 aa, Streptococcus mutans UA159
MTKVVTDATFEAETAKGLVLVDFWATWCGPCLMQAPILEQLSEELDEDELKIVKLDVDENPNTAQNFGIMSIPTLLFKKDGEVVKQVAGVHTKDQIKAIVAELA

SEQ ID NO: 7677 - DNA, 321 bp, Drosophila melanogaster; identical to SEQ ID NO: 1180
  CDS (1)..(321)

SEQ ID NO: 7678 - protein, 106 aa, Drosophila melanogaster; identical to SEQ ID NO: 1181

SEQ ID NO: 7679 - DNA, 327 bp, Vibrio vulnificus CMCP6
  CDS (1)..(327): transl_table=11
atgagtgacaagattttgcagctgtctgacgaaggtttcgaaaacgacgttatcaacgctgcaggcccagtactagttgatttttgggcagaatggtgtggtccttgtaagatgattgccccaatcctggacgaaatcgcagaagagtacgaaggcaaactcactatcggcaaactgaatattgaccacaacgcgggcacaccacctaagtttggtattcgtggcatcccaaccctgctgcttttcaaaaacggcagcgtagctgcgacgaaagtgggcgcactgtcaaaaactcaattgaaagagtttttggatgcgaacctataa

SEQ ID NO: 7680 - protein, 108 aa, Vibrio vulnificus CMCP6
MSDKILQLSDEGFENDVINAAGPVLVDFWAEWCGPCKMIAPILDEIAEEYEGKLTIGKLNIDHNAGTPPKFGIRGIPTLLLFKNGSVAATKVGALSKTQLKEFLDANL

SEQ ID NO: 7681 - DNA, 333 bp, Lactobacillus plantarum WCFS1
  CDS (1)..(333): transl_table=11
atgatcgaaccagtcgataagacgacttttgcgacggtggctgatggtaccgcgttaactgtggttgatttttgggcggattggtgtggcccttgcaagatgcaggaaccagtgcttgaagcgttagatgaactgtacgatgggcaagtgaaatttgcttcgctcgacgttgatcaacatcaggaaattgcgcaacaatttgagattatgagtattccggcgttagtgatattcaagaatggccagcccgctgaaaaggtggttggttttcatccccaagcagcattgaagaaatatctggatcaaaaactagccgaagtgaagcctgcctaa

SEQ ID NO: 7682 - protein, 110 aa, Lactobacillus plantarum WCFS1
MIEPVDKTTFATVADGTALTVVDFWADWCGPCKMQEPVLEALDELYDGQVKFASLDVDQHQEIAQQFEIMSIPALVIFKNGQPAEKVVGFHPQAALKKYLDQKLAEVKPA

SEQ ID NO: 7683 - DNA, 315 bp, Bacteroides thetaiotaomicron VPI-5482; identical to SEQ ID NO: 1182
  CDS (1)..(315): transl_table=11

SEQ ID NO: 7684 - protein, 104 aa, Bacteroides thetaiotaomicron VPI-5482; identical to SEQ ID NO: 1183

SEQ ID NO: 7685 - DNA, 315 bp, Enterococcus faecalis V583
  CDS (1)..(315): transl_table=11
atgacacaagcaattaccgataaagattttgcaacagaaacagatgaaggattagtcttaatcgacttttgggcaacttggtgtggcccttgccgtatgcaagcacccatcttagaacaattatctgaagaatatgatgaagacgaagtgaaaatcgtcaaaatggatgtggatgaaaatcctgcaacaccagcaagttttggaatcatgagcatcccaacattgctattgaaaaaagatggcgaagttgttgaaaaagcagtcggtgttcatacaaaagaccaattgcaagcaatgattgccaaacacttataa

SEQ ID NO: 7686 - protein, 104 aa, Enterococcus faecalis V583
MTQAITDKDFATETDEGLVLIDFWATWCGPCRMQAPILEQLSEEYDEDEVKIVKMDVDENPATPASFGIMSIPTLLLKKDGEVVEKAVGVHTKDQLQAMIAKHL

SEQ ID NO: 7687 - DNA, 339 bp, Coxiella burnetii RSA 493
  CDS (1)..(339): transl_table=11
atgagcgaacatgtacatactgcttccgacgaaaactttgaaactgaagtgctgcaagccgatatgcctgtccttgtggacttttgggcagaatggtgccagccctgcaagatgattagtccggttgttgaggaaatcgcaaaggaatacgccggtcgcgttaaggtatttaaactcaatgtggatgaaaatgcgcaaacccctacaaaatacggcgtgagaggaatacccagtcttttaatctttcgtgagggcgaagtagttgataggaaagtcggtgcacttaataaatcgcaattagcggcctttttagatgagagcttgcatttttcttcataa

SEQ ID NO: 7688 - protein, 112 aa, Coxiella burnetii RSA 493
MSEHVHTASDENFETEVLQADMPVLVDFWAEWCQPCKMISPVVEEIAKEYAGRVKVFKLNVDENAQTPTKYGVRGIPSLLIFREGEVVDRKVGALNKSQLAAFLDESLHFSS

SEQ ID NO: 7689 - DNA, 327 bp, Rhodopirellula baltica SH 1
  CDS (1)..(327): transl_table=11
atggcctcagaagcagtcaaagaattcaacgacgacaatttcgattccgaagtcctcaaaagcgacagccctgtgctggttgacttttgggctccatggtgtggtccttgccgtcaaattgcacccatgatcgacgaactggcttcggaaaatcctggcgtcaagattggcaaagtcaacatcgacgataacccaggtgccgctcaaaagttcggcatcaacagcatcccaacattgttgctgttcaagaacggcgagatcgctgacaccttcgttggtgttcgcccgaaagccgctttgcaagacgccctgacttcggtcagctga

SEQ ID NO: 7690 - protein, 108 aa, Rhodopirellula baltica SH 1
MASEAVKEFNDDNFDSEVLKSDSPVLVDFWAPWCGPCRQIAPMIDELASENPGVKIGKVNIDDNPGAAQKFGINSIPTLLLFKNGEIADTFVGVRPKAALQDALTSVS

SEQ ID NO: 7691 - DNA, 318 bp, Haemophilus ducreyi 35000HP
  CDS (1)..(318): transl_table=11
atgacacatcaagtaactgatgcaacatttgaacaagaagttttaaaatcggatttacctgttttattggatttttgggcaccgtggtgtggcccttgcagaacgattgcgccatggttagatgaattagcacaagagttcgcaggacgtgctaaagtggctaaagtaaatgtagatgaaaatcaacaaatcgctgctcaatttggtattcgttccattccaacgttactactatttaaaaatggggaagtggtcgcgattcaagttggtgtattaccaaaatcacaattagttacttttattgaacaagcgctttaa

SEQ ID NO: 7692 - protein, 105 aa, Haemophilus ducreyi 35000HP
MTHQVTDATFEQEVLKSDLPVLLDFWAPWCGPCRTIAPWLDELAQEFAGRAKVAKVNVDENQQIAAQFGIRSIPTLLLFKNGEVVAIQVGVLPKSQLVTFIEQAL

SEQ ID NO: 7693 - DNA, 426 bp, Bordetella bronchiseptica RB50
  CDS (1)..(426): transl_table=11
atgacagtggtatgctttaatccttcctacacgtcgaacaagaacagcggccgcatgctccatgcacgggccgcgcagcggaatccgagaatcaccatcatgagcgagcaaatcaagaacgtcagcgacgccagcttcgaggcagatgtgctgaaatccggccagccggtgctggtggactactgggccgcctggtgtggcccctgcaagatgatcgcccccatcctcgaagaggtggcttccgaatacgccggccgcctgaccgtggccaagctgaacgtggacgaaaaccaggacacggcggccaagtacggcgtgcgcggcattccgaccctgatgctgttcaaggacggccaggccgccgccaccaaggtcggcgccctgtccaaatcgcaactgaccgcattcctggacggcgcgttgtaa

SEQ ID NO: 7694 - protein, 141 aa, Bordetella bronchiseptica RB50
MTVVCFNPSYTSNKNSGRMLHARAAQRNPRITIMSEQIKNVSDASFEADVLKSGQPVLVDYWAAWCGPCKMIAPILEEVASEYAGRLTVAKLNVDENQDTAAKYGVRGIPTLMLFKDGQAAATKVGALSKSQLTAFLDGAL

SEQ ID NO: 7695 - DNA, 315 bp, Porphyromonas gingivalis W83; identical to SEQ ID NO: 1184
  CDS (1)..(315): transl_table=11

SEQ ID NO: 7696 - protein, 104 aa, Porphyromonas gingivalis W83; identical to SEQ ID NO: 1185

SEQ ID NO: 7697 - DNA, 333 bp, Gloeobacter violaceus PCC 7421
  CDS (1)..(333): transl_table=11
atgtcagctgcagtgccggttggtgattcgaacttcaaaaccgaagttctcgacagcgaattgccagtgctggttgatttctgggctccctggtgcgggccgtgccgcatggtggcgccggtggtcgacgagattgcccagcagtacagtggcaagctcaaggtggtcaaggtcaacaccgacgaaaatccccaggtggcaagccagtacggcatccgcagcattccgacgctgatggtttttaagtccggctccaaggtggatatggtcgtcggtgccgttccgaagacgacgctggccaccaccctcgaaaagcatatcgatatcaaatag

SEQ ID NO: 7698 - protein, 110 aa, Gloeobacter violaceus PCC 7421
MSAAVPVGDSNFKTEVLDSELPVLVDFWAPWCGPCRMVAPVVDEIAQQYSGKLKVVKVNTDENPQVASQYGIRSIPTLMVFKSGSKVDMVVGAVPKTTLATTLEKHIDIK

SEQ ID NO: 7699 - DNA, 327 bp, Photorhabdus luminescens subsp. laumondii TTO1
  CDS (1)..(327): transl_table=11
atgagcgacaaaattattcatttgagtgacgctagctttgatactgacgttcttaacgcagcaggtccagttcttgtcgatttttgggctgcctggtgtggaccatgtaaaatgattgcacctattttagatgaaattgccccagaatattcaggcaaactgactattactaaattgaacattgatgacaacccggcaactgctcctaagtatggtatccgtggtattcctacactgttgctgtttaaagatggtcaggttgctgctacaaaagtgggagcactgtcaaaaactcaattgaaagaatttttggatgctaatctctga

SEQ ID NO: 7700 - protein, 108 aa, Photorhabdus luminescens subsp. laumondii TTO1
MSDKIIHLSDASFDTDVLNAAGPVLVDFWAAWCGPCKMIAPILDEIAPEYSGKLTITKLNIDDNPATAPKYGIRGIPTLLLFKDGQVAATKVGALSKTQLKEFLDANL

SEQ ID NO: 7701 - DNA, 321 bp, Rhodopseudomonas palustris CGA009
  CDS (1)..(321): transl_table=11
atggccgttggtaaggtgtcagacgccgatttcgaaaacgaggttctcaacgcccaggggcctgtggtggtggacttctgggccgagtggtgcggcccgtgccgcatgatcgcgccggcgctcgatgaaatcgccggagcgatgggcgacaaggtcaagatcgtgaagctcaacgtcgacgaaagcccggtcaccgcctcgaagtatggcgtgatgtcgatcccgaccctgatgatcttcaagggcggcgagatggcttcgcgccaggtcggcgccgcgccgaaggccaagctgcagcagtggatcagcgcagcggtctga

SEQ ID NO: 7702 - protein, 106 aa, Rhodopseudomonas palustris CGA009
MAVGKVSDADFENEVLNAQGPVVVDFWAEWCGPCRMIAPALDEIAGAMGDKVKIVKLNVDESPVTASKYGVMSIPTLMIFKGGEMASRQVGAAPKAKLQQWISAAV

SEQ ID NO: 7703 - DNA, 330 bp, Geobacter sulfurreducens PCA
  CDS (1)..(330): transl_table=11
atggccagtgacaaagtcctcacattcagtgacgataccttcgatagcgaggtgctcaagtcgcccgttccggttctcgttgatttttgggccacctggtgcgccccctgcaaggccatcgctcctgtcatcgatgccattgccgacgaatttgacggaaaagtgaaggtcggcaaggttaatgttgatgataaccccggaactccgggcaagtacggcgtgcgcggcatccctaccgttatcctcttcaaggagggcaaggtcgtggatcaggtcgtcggggccgtgcccaaagcccaacttgaggcgcttatcaaaaaagcgctgtaa

SEQ ID NO: 7704 - protein, 109 aa, Geobacter sulfurreducens PCA
MASDKVLTFSDDTFDSEVLKSPVPVLVDFWATWCAPCKAIAPVIDAIADEFDGKVKVGKVNVDDNPGTPGKYGVRGIPTVILFKEGKVVDQVVGAVPKAQLEALIKKAL

SEQ ID NO: 7705 - DNA, 309 bp, Mycoplasma mycoides subsp. mycoides SC str. PG1; identical to SEQ ID NO: 1186
  CDS (1)..(309): transl_table=4

SEQ ID NO: 7706 - protein, 102 aa, Mycoplasma mycoides subsp. mycoides SC str. PG1; identical to SEQ ID NO: 1187

SEQ ID NO: 7707 - DNA, 300 bp, Strongylocentrotus purpuratus
  CDS (1)..(300)
atggctggatccgttgtccaaattgcaaatttgggggaatataaagatttcatcaaggattctcccgctgtaatcgacttctacgcaacatggtgtggaccatgcaagggactcgcaacagaatacccggctgtgaaatttggtaaagtggatgttgatgacgcatcggaagtatcagaagagtgtggcatcagtgcgatgcctacattccagttctttaagaatggggagaaagtagcagaagtgaaaggagcaagtgaaaaagcactggtggatgccctcaaggaattaataaaatag

SEQ ID NO: 7708 - protein, 99 aa, Strongylocentrotus purpuratus
MAGSVVQIANLGEYKDFIKDSPAVIDFYATWCGPCKGLATEYPAVKFGKVDVDDASEVSEECGISAMPTFQFFKNGEKVAEVKGASEKALVDALKELIK

SEQ ID NO: 7709 - DNA, 396 bp, Strongylocentrotus purpuratus
  CDS (1)..(396)
atgttatactgtcttagagcagtagatggcgccattacagtgctactccatctcaagcacatcatcttgaggattaggaggattgcctttcctcaagattttgacaatatactcaccacgtctggggacaagctggttgttatatacttcagcgccacttggtgcggaccatgtcgatccatctcaccggagtttgaaactctttcgaaagatcctgaaatagcctccaatgtagttttctgtaaagctgatgtagacgaagcgtcagagatagcagaagaatgtgaagtccaatgtatgccgacattctgcttcttcagaggggaatcaaagatttaccagttctctggaggaaataaaggaaggctgagagaatacatcgcaaaatacaagtga

SEQ ID NO: 7710 - protein, 131 aa, Strongylocentrotus purpuratus
MLYCLRAVDGAITVLLHLKHIILRIRRIAFPQDFDNILTTSGDKLVVIYFSATWCGPCRSISPEFETLSKDPEIASNVVFCKADVDEASEIAEECEVQCMPTFCFFRGESKIYQFSGGNKGRLREYIAKYK

SEQ ID NO: 7711 - DNA, 414 bp, Nasonia vitripennis
  CDS (1)..(414)
atgcttcgtactggattcagagtagtgtacagggctgttggcactaggggatatacgagtgccgcgccagaaaaaactgtagcttcttcaagtttcaaagtacaggacagcaaggatttcacagacagagttaaaaatgcaaaagtcccagtgattgttgacttttttgcaacatggtgcaatccatgccgattgttaacaccaagaatagagcaagttgttgctgaaaaacagggtaaaatactactagccaaagttgatatcgatgaaaacacagacctcgctttggattatgaggttggctctgtacctgtacttatggttatgaaagatggtaaagtcttggaaaaaattattggattacaagatactgacaaacttagaaaatttgttagcaagcatgctgattcatag

SEQ ID NO: 7712 - protein, 137 aa, Nasonia vitripennis
MLRTGFRVVYRAVGTRGYTSAAPEKTVASSSFKVQDSKDFTDRVKNAKVPVIVDFFATWCNPCRLLTPRIEQVVAEKQGKILLAKVDIDENTDLALDYEVGSVPVLMVMKDGKVLEKIIGLQDTDKLRKFVSKHADS

SEQ ID NO: 7713 - DNA, 411 bp, Anopheles gambiae str. PEST
  CDS (1)..(411)
atgctccgtatcttccgcaatgccatactggacaaacgcatcacccgcaagacgttctccttctcagccattgcggccaagcgctacgtcataaaggatcactacgagttcgaccagaaggtgataaacagcgacaacccggtgatcgtcaacttccacgccgaatggtgtgacccgtgcaaaatacttaccccgaagatgacggaactgctggaaccgtcggaggagatcgatctggcgatcgtcgatgtggatgacaatgcggagctggtgcagacgttcgaggtgaaggcggtccccgccatccttgccttccggaacggtgtggtggtggacaaattcatcggcctggtggacgcgaacatgatcgagaatctgattggcaagctgacgaagaaaaaggccacctaa

SEQ ID NO: 7714 - protein, 136 aa, Anopheles gambiae str. PEST
MLRIFRNAILDKRITRKTFSFSAIAAKRYVIKDHYEFDQKVINSDNPVIVNFHAEWCDPCKILTPKMTELLEPSEEIDLAIVDVDDNAELVQTFEVKAVPAILAFRNGVVVDKFIGLVDANMIENLIGKLTKKKAT

SEQ ID NO: 7715 - DNA, 324 bp, Anopheles gambiae str. PEST
  CDS (1)..(324)
atggtgtacatggtgaaagattccgaggacttcaacaacaagctggaagcggccggcgaccagctcgtcgtggtcgatttcttcgccacctggtgcggcccgtgcaaggtgatcgccccgaagctggaggagttccagaacaagtacgcggacaagatcgtcgtggtgaaggtggacgtggacgagtgcgaggagctggcggcccagtacaacattgccagcatgcccaccttcctgttcatcaagcggaaggaggtggtcggccagttctccggcgcgaacgcggaaaagctggaaaacttcatccagcagcactcggcgtaa

SEQ ID NO: 7716 - protein, 107 aa, Anopheles gambiae str. PEST
MVYMVKDSEDFNNKLEAAGDQLVVVDFFATWCGPCKVIAPKLEEFQNKYADKIVVVKVDVDECEELAAQYNIASMPTFLFIKRKEVVGQFSGANAEKLENFIQQHSA

SEQ ID NO: 7717 - DNA, 324 bp, Magnaporthe grisea 70-15; identical to SEQ ID NO: 1188
  CDS (1)..(324)

SEQ ID NO: 7718 - protein, 107 aa, Magnaporthe grisea 70-15; identical to SEQ ID NO: 1189

SEQ ID NO: 7719 - DNA, 942 bp, Gibberella zeae PH-1
  CDS (1)..(942)
atgtcggaacatcttgccgtgataagctcaaagagccagttcgactcgcttctcaagtcttcgcgcatcgttgtcgctgatttctacgccgactggtgcggtccttgcaagcagatcgctcccctctacgagagcctcgccatcacactatcgcgccccaacctggtcacctttgccaagatcaacagcgacgagcaagccgagctctcccaagaatacagcgtctcaactctgcctacattcctcgtcttccgcgacggaaaagaaatcgacaaggttcagggagctgaccctaacaagcttaaggccatcatccagaaacttgtgaccgaggtcgactcccttggcgagagctctggttcaggaagcggcgatggagtcaactggaagggtgccgaagccccccgaggctacagcgacatcaccgaccaaatagagctccgagatctcgaggttctcaacgccgatgaggctgccggtggtgtccgggttcttttcgaaggctccaagccaagcggtcttggtaacggcaagggaacatccaaggactacgttcagagcggagccgacgaccagctacttctctacgtccctttccagtctatcctcacctccctccctcccaaggacgacgaagatgtgatgcgacctggcaacgttcacctgtacatcaaccgcacccacaacctcgactttagcgaagccgacgataccgaccccacgcaggcaatcgagatcggtcccgaagactggaacgctgacggaacagtcaacctgagcctgcgatacgtcaagttccagaagacatcgagtcttgtcatctacgtccagcagggtgagggcgatggagagaccgtacgtcttgacagagtgaggctcattggtgaggctggggccaagcgcgaaatgggcaagctccagaaggttggtgaggatgagtaa

SEQ ID NO: 7720 - protein, 313 aa, Gibberella zeae PH-1
MSEHLAVISSKSQFDSLLKSSRIVVADFYADWCGPCKQIAPLYESLAITLSRPNLVTFAKINSDEQAELSQEYSVSTLPTFLVFRDGKEIDKVQGADPNKLKAIIQKLVTEVDSLGESSGSGSGDGVNWKGAEAPRGYSDITDQIELRDLEVLNADEAAGGVRVLFEGSKPSGLGNGKGTSKDYVQSGADDQLLLYVPFQSILTSLPPKDDEDVMRPGNVHLYINRTHNLDFSEADDTDPTQAIEIGPEDWNADGTVNLSLRYVKFQKTSSLVIYVQQGEGDGETVRLDRVRLIGEAGAKREMGKLQKVGEDE

SEQ ID NO: 7721 - DNA, 366 bp, Gibberella zeae PH-1
  CDS (1)..(366)
atggttcaccacattacttcaaacgacgagctacagaagctcctctcgtcaacaacatacgtcgccgttgacttcttcgcagactggtgtcctccctgcaaggccatcgcccccgtctacgagcaactctccactaagcacagcgtccctgacgttttggcctttgccaaagtcaacgtggaccatgtccaggacgccgcacaacagtatggtatcactgccatgcccacctttatgttcttcaaggaaggaaagcaggtcgccgtcaatggccaggctgtgatcaagggtgctgatcccagaacgctgggagcagctgctgagaagctgggcggcctagcacaaaagcgagttgctggcgcttaa

SEQ ID NO: 7722 - protein, 121 aa, Gibberella zeae PH-1
MVHHITSNDELQKLLSSTTYVAVDFFADWCPPCKAIAPVYEQLSTKHSVPDVLAFAKVNVDHVQDAAQQYGITAMPTFMFFKEGKQVAVNGQAVIKGADPRTLGAAAEKLGGLAQKRVAGA

SEQ ID NO: 7723 - DNA, 318 bp, Apis mellifera
  CDS (1)..(318)
atggtttaccaaattaagaatgccagtgatttaaaaaatcaacttgaaaaagctggaaaccaattggttgtaattgatttctttgctatgtggtgtggtccatgcaaaatgattggacctaaagtagaagagttatcaatggaaatggaagatgttatttttttgaaagttgatgtagatgaatgcgaagatattgctggtgaatatgaaattaccagtatgcctacctttgtttttatcaaaaataacaaagtgctggaaaacttttctggtgctaattatgataaacttaaaagcacaattcagaagcacaaataa

SEQ ID NO: 7724 - protein, 105 aa, Apis mellifera
MVYQIKNASDLKNQLEKAGNQLVVIDFFAMWCGPCKMIGPKVEELSMEMEDVIFLKVDVDECEDIAGEYEITSMPTFVFIKNNKVLENFSGANYDKLKSTIQKHK

SEQ ID NO: 7725 - DNA, 411 bp, Apis mellifera
  CDS (1)..(411)
atgttgcgaattggtttgagagttatacgcactgctataggaagcagagcttttgcaaatgcaccggctcaagaacaagcaatctcaacaactttcaaagttcaagatccaaaagattttaataatcgtgttaaaaattctaaagtaccagtgatcgttgatttttttgcaacatggtgcaatccttgtcgcatgcttactcctcgtatagaatctgtaattgcggaaaaacaaggaaaagttttattggcaaaagttgatattgatgagaatagtgatcttgcattggattatgaggttggatccgttccagtcctaattgcaatgaaagatggaaaggttttagatagaattgttggtcttcaggatgtagataaacttaaacaatttgtagataagtattcagaataa

SEQ ID NO: 7726 - protein, 136 aa, Apis mellifera
MLRIGLRVIRTAIGSRAFANAPAQEQAISTTFKVQDPKDFNNRVKNSKVPVIVDFFATWCNPCRMLTPRIESVIAEKQGKVLLAKVDIDENSDLALDYEVGSVPVLIAMKDGKVLDRIVGLQDVDKLKQFVDKYSE

SEQ ID NO: 7727 - DNA, 312 bp, Candida glabrata CBS 138
  CDS (1)..(312)
atggtcaagcaaatcacaagtgtttctgaattcgacagtgctattgctgttgacaagttggtcgttgtcgacttcttcgccacctggtgtggtccatgtaagatgatcgccccaatgatcgaaaagttcgctgctgaatactctaccgctgacttctacaagctagatgtcgacgagttgccagaagtcgcccaaaagaacgaagtctccgctatgccaactttggtcttgttcaagaacggtaaggaagtcgccaaggtcgtcggtgccaacccagctgctatcaagcaagccattgccaacaacgtctaa

SEQ ID NO: 7728 - protein, 103 aa, Candida glabrata CBS 138
MVKQITSVSEFDSAIAVDKLVVVDFFATWCGPCKMIAPMIEKFAAEYSTADFYKLDVDELPEVAQKNEVSAMPTLVLFKNGKEVAKVVGANPAAIKQAIANNV

SEQ ID NO: 7729 - DNA, 315 bp, Kluyveromyces lactis NRRL Y-1140
  CDS (1)..(315)
atggtcgctcaacttacttccgcatccgaattcgaaaaggctttgactgacgacaagttggtcgtcgtcgacttctttgccacctggtgtggtccatgcaagatgattgccccaatgttggaaaagttcgctaaggaatacgagggtaaagctaccttcttgaaggttgacgttgatgagttgccagatgttgcaaagaacaacgatgtcagtgctatgccaaccctagttttcttcaagtccggtaaggaaatttctagagtcctaggtgctaacttggctgctatcaagcaaaccattgctgctaacgtgtaa

SEQ ID NO: 7730 - protein, 104 aa, Kluyveromyces lactis NRRL Y-1140
MVAQLTSASEFEKALTDDKLVVVDFFATWCGPCKMIAPMLEKFAKEYEGKATFLKVDVDELPDVAKNNDVSAMPTLVFFKSGKEISRVLGANLAAIKQTIAANV

SEQ ID NO: 7731 - DNA, 420 bp, Kluyveromyces lactis NRRL Y-1140; identical to SEQ ID NO: 1192
  CDS (1)..(420)

SEQ ID NO: 7732 - protein, 139 aa, Kluyveromyces lactis NRRL Y-1140; identical to SEQ ID NO: 1193

SEQ ID NO: 7733 - DNA, 1011 bp, Debaryomyces hansenii CBS767
  CDS (1)..(1011)
atgagttcggtgattcaatttgtgaagtcttcacaagacttcgaagcgtatctatcaaagaacaaatatgtagtggccaattttacggctacttggtgtggaccatgtcaacaagtgaaaccaataatagatgcattgtatacggatgagacaaatgaaaggatagagatcgttagagtggatttagatagccacggcgatttggcttctcagtatcaagtcaccagtattccaacctttgtttttttggaaagtggcaaagaagtcaacagggttacaggggccaatgttccagagtttatgaagcaatttcattcgatgaaagaaaaggcggccagcgacgaagttgccactaagagggttggaaatggtgcgagtagtgcttctgtttcgacctctgcatggaaggacattgctgataaaattcccaaaggctttgaaatcttgaatggttctatttattttggtcaattcgaagcattgaatgcattgccactctacaaaggtgaaaatgattcagacgtgaaaaatctcttcagactcgactacacgaaggaaaacagtacggtattatcagatgctgattctcagttgttgttttatattccatttacaaacatctccaaagtttcctcgatcgtactcaaacttagaaaggataacaaaatcgcctcggacgtcgaattggaattggatgaggacgatttgaagaacgaatgtcaaaatccaagccttattaaggtctggctcaaccaacatagcattatgtcattcgatgatgcttctgctgacatcaatgccccacatatcgaaaaaattgcggaatcgaacgatgagatttggtacgaatgcaaattgaaattcgtcagattccaaaatgtccaaagcttgaacattttgatcgacggtgatgacgaagactatcatactcttcttgataaagtcatcttcattggtgtcaatggtgaatcaaaggaacaggctaagatcctgaaattagatgatgaataa

SEQ ID NO: 7734 - protein, 336 aa, Debaryomyces hansenii CBS767
MSSVIQFVKSSQDFEAYLSKNKYVVANFTATWCGPCQQVKPIIDALYTDETNERIEIVRVDLDSHGDLASQYQVTSIPTFVFLESGKEVNRVTGANVPEFMKQFHSMKEKAASDEVATKRVGNGASSASVSTSAWKDIADKIPKGFEILNGSIYFGQFEALNALPLYKGENDSDVKNLFRLDYTKENSTVLSDADSQLLFYIPFTNISKVSSIVLKLRKDNKIASDVELELDEDDLKNECQNPSLIKVWLNQHSIMSFDDASADINAPHIEKIAESNDEIWYECKLKFVRFQNVQSLNILIDGDDEDYHTLLDKVIFIGVNGESKEQAKILKLDDE

SEQ ID NO: 7735 - DNA, 312 bp, Debaryomyces hansenii CBS767; identical to SEQ ID NO: 1194
  CDS (1)..(312)

SEQ ID NO: 7736 - protein, 103 aa, Debaryomyces hansenii CBS767; identical to SEQ ID NO: 1195

SEQ ID NO: 7737 - DNA, 396 bp, Yarrowia lipolytica CLIB122
  CDS (1)..(396)
atgacaatcacagatctccactcgttgggtgaattcgaggaggccatcaagtcagaagaactgacggtaatcaagttctcgacaaagacatgcataccatgcaaaatgattgcccccgtttatgaaaagtactccaaggcttacaaaggagcgaagtactacaattgcgactctgaagagctcgtggaagtggcttccatggtacccgtcagctctgtacccaccttcgcgctctacaagaatggtgaaatcgtgctcattgtgtctggcaatggagctgaccctcggaagctgagaagtgggatccgaaagtatgccgccaaagatgagaccaagaagcctcgtcctgtgactaacggaatcaagaagagacgtagacccaagaagataacttga

SEQ ID NO: 7738 - protein, 131 aa, Yarrowia lipolytica CLIB122
MTITDLHSLGEFEEAIKSEELTVIKFSTKTCIPCKMIAPVYEKYSKAYKGAKYYNCDSEELVEVASMVPVSSVPTFALYKNGEIVLIVSGNGADPRKLRSGIRKYAAKDETKKPRPVTNGIKKRRRPKKIT

SEQ ID NO: 7739 - DNA, 600 bp, Yarrowia lipolytica CLIB122
  CDS (1)..(600)
atgaaagaactcacctccacagacgagtacttcaaggccatccaccccgccacggtgtcggtggtggacttctacgccgactggtgcgggccatgcaaggcggtggcgccgggctacgccaagctggccgagcaatacaaaaaccaggcgtcgttctacaaggtcaacgtggacaacaaccagggcgcatcgtcgcacgccggagtgtctgccatgcccacgtttggggtgttcaagagcggcaagcttctggagacggtgcggggcgccgatctaggggccgtggagcgactgatcaagaaacacggcgctgcggccaaacccgtctacgtgacccagggccatgtgctgggccagaaacccatgtccgcccaggccacgtcgtcgattcgacacgtgatccaggccattctcgcctactttgtctcactgttttcgctgctgcccctggagagcgccacgagctttgtcgaggctgcgcaggcccgacagaagggtcgcgagatgcagcgccagcgggctcctccccgggggttcgatggctcggatcgtttctctttcaacaagaaggagagtccggcaagcacctgcagtagttag

SEQ ID NO: 7740 - protein, 199 aa, Yarrowia lipolytica CLIB122
MKELTSTDEYFKAIHPATVSVVDFYADWCGPCKAVAPGYAKLAEQYKNQASFYKVNVDNNQGASSHAGVSAMPTFGVFKSGKLLETVRGADLGAVERLIKKHGAAAKPVYVTQGHVLGQKPMSAQATSSIRHVIQAILAYFVSLFSLLPLESATSFVEAAQARQKGREMQRQRAPPRGFDGSDRFSFNKKESPASTCSS

SEQ ID NO: 7741 - DNA, 975 bp, Yarrowia lipolytica CLIB122
  CDS (1)..(975)
atgacaccaaaacctcctccaacaaaacacaactcagcacaacacaccaccacaaccatgaagctacatacagtcacgtctctgggggagtttgacaaggtgctcaagtccgagctagtcattgtcgatttcttcgcagaatggtgcggaccctgcaaggtgatttcaccctttgtcgagaccctccagtccgactacaaccaggtgctatttgcaaaggtcgacgtggatcagggcaaggacattgctgccaagtacaccgtgtcttccatgcccacttttgtgtacttccacaagggcaaggaggtcaatcgggtcgttggagctgacagagccggaattactactggtctagatcagttggtttccctgaaccctgcagccgtcaagtcccttcctggagcaggaggcgccgactctgaggatgctggctccactgtcaactcggctgacaactctgccatcgcagcttttgtgcccaagaacatggagattctcaactctggtattgacttcacctcgaccgaggctctcaacattgcaaacaacggcgacgtgcgaaacgtgctgaccaacgggctgtcgggcgatcaggagtttgtctccgatacagactcgcagatgctgctcaacgtgcagctgcagaacaacgccaagatccagacgattctgctcaagaagcccgccgtcagtggtgacaaccagatcccctcgcatatcaaggtgtgggccaaccatcccaacctgtcgttcgacgacacccagtcgatcgaggcccagcatgtcggagatgtggtttttgatggtgagtgggccgagatcaagctcagatacgtgcggttccagaacgtgtcgaccatctccatgctcattgagggagaggacgaggacgagtgcactaatttggatagagtggtgctcattggatcaagcggcgaggctcgaagcggaaagctcgagaagatgcaggattag

SEQ ID NO: 7742 - protein, 324 aa, Yarrowia lipolytica CLIB122
MTPKPPPTKHNSAQHTTTTMKLHTVTSLGEFDKVLKSELVIVDFFAEWCGPCKVISPFVETLQSDYNQVLFAKVDVDQGKDIAAKYTVSSMPTFVYFHKGKEVNRVVGADRAGITTGLDQLVSLNPAAVKSLPGAGGADSEDAGSTVNSADNSAIAAFVPKNMEILNSGIDFTSTEALNIANNGDVRNVLTNGLSGDQEFVSDTDSQMLLNVQLQNNAKIQTILLKKPAVSGDNQIPSHIKVWANHPNLSFDDTQSIEAQHVGDVVFDGEWAEIKLRYVRFQNVSTISMLIEGEDEDECTNLDRVVLIGSSGEARSGKLEKMQD

SEQ ID NO: 7743 - DNA, 315 bp, Yarrowia lipolytica CLIB122
  CDS (1)..(315)
atggccgttacccagatcacctccgtctccgacttccagaacgccatcaagtccgacaagctcaccgtcatcgacttctacgctacctggtgcggaccctgcaagatgattgcccccacctttgacaagttctccgagaccttcaccgacgctcagttctaccgatgtgacgtcgatgaggcctctgctgtcgcccaggaggttggcgtcaccgccatgcccacctttgccttctacaagaacggcgagaagatcaccaccgtcatgggtgccaacccctctgccctgaacgctgccatcaagcagaacgtctaa

SEQ ID NO: 7744 - protein, 104 aa, Yarrowia lipolytica CLIB122
MAVTQITSVSDFQNAIKSDKLTVIDFYATWCGPCKMIAPTFDKFSETFTDAQFYRCDVDEASAVAQEVGVTAMPTFAFYKNGEKITTVMGANPSALNAAIKQNV

SEQ ID NO: 7745 - DNA, 333 bp, Aspergillus nidulans FGSC A4; identical to SEQ ID NO: 1332
  CDS (1)..(333)

SEQ ID NO: 7746 - protein, 110 aa, Aspergillus nidulans FGSC A4; identical to SEQ ID NO: 1333

SEQ ID NO: 7747 - DNA, 654 bp, Aspergillus nidulans FGSC A4
  CDS (1)..(654)
atggcgctcacgaccgaagaaactgcgctggtcgaaacagccactgtgacaatcaacagcatcccagtttctgaagactacagtgtcgcgagcgccgccctctcctccgatggacgcatcttcaccggtgtcaatgtataccatttcaccggcggtccctgcgcagagcttgtagtgatgggtgttgcagccgcagcaggagtgacgcatttaaaacacatcgtcgccgtggggaacaatgatcgcggggtcctgagtccatgcggccggtgtcgacaggtcttgctcgatctgcagccgggagtccgagttatcattggaaagaaaggtagcgagcaaagcgtcccccccagcgaactgctgccctgctcgtacctgtacgccgaccccgtcattttcaaggccctcgtctcttcgggacccgtcgtcgttgatttctttgctacatggtgcggaccctgcaaagccgttgctccggtcgttggaaagttcagtgagacatataccggcgtcaagttccttcaggttgatgtcgacaaggcgcgttcgatagctcaggagcatcagatccgggctatgcccacctttgtgctctacaaggacgattatcaaaccgcgatgcgcaagccaaaggcaaaccagaagagaaactga

SEQ ID NO: 7748 - protein, 217 aa, Aspergillus nidulans FGSC A4
MALTTEETALVETATVTINSIPVSEDYSVASAALSSDGRIFTGVNVYHFTGGPCAELVVMGVAAAAGVTHLKHIVAVGNNDRGVLSPCGRCRQVLLDLQPGVRVIIGKKGSEQSVPPSELLPCSYLYADPVIFKALVSSGPVVVDFFATWCGPCKAVAPVVGKFSETYTGVKFLQVDVDKARSIAQEHQIRAMPTFVLYKDDYQTAMRKPKANQKRN

SEQ ID NO: 7749 - DNA, 357 bp, Candida albicans SC5314
  CDS (1)..(357): transl_table=12
atgttgcaaaatattgaaaccaaacaacaattttcttctgctttacaaaacaagaatgacatgattgttcttgactttttcgacgaatgttcacattgtagtgacttgaatgataaattggatgaattctccgatatgtatgaagctcaaaacattaggttctataaggttaatattgaagaagatagagaattggctgaagactacaaagtttcttccattcctaccactttatttttcaaaaagggaaaagtttttgataaagttgttggacctgaaccaaatgaaatcaagaaagttcttgacaagaatttaatgggctggtcaggtcgtccactgcaatcatccagaacatga

SEQ ID NO: 7750 - protein, 118 aa, Candida albicans SC5314
MLQNIETKQQFSSALQNKNDMIVLDFFDECSHCSDLNDKLDEFSDMYEAQNIRFYKVNIEEDRELAEDYKVSSIPTTLFFKKGKVFDKVVGPEPNEIKKVLDKNLMGWSGRPSQSSRT

SEQ ID NO: 7751 - DNA, 312 bp, Candida albicans SC5314
  CDS (1)..(312): transl_table=12
atggttcacgttgtcactgaagttaacgaattccaaacccttttaaaggaaaacaacttagttattgttgacttttttgccacttggtgtggtccatgtaaaatgattgctccattattagaaaaattccaaaatgaatattctaatattaaatttttgaaaattgatgttgatcaattgggttctttagcacaagaatataatgttagttctatgccaactttgattttattcaaaaatggtgaagaagtcaatcgtgtcattggtgctaacccagctgctattaaacaagctttggcttctcttgcttaa

SEQ ID NO: 7752 - protein, 103 aa, Candida albicans SC5314
MVHVVTEVNEFQTLLKENNLVIVDFFATWCGPCKMIAPLLEKFQNEYSNIKFLKIDVDQLGSLAQEYNVSSMPTLILFKNGEEVNRVIGANPAAIKQALASLA

SEQ ID NO: 7753 - DNA, 321 bp, Strongylocentrotus purpuratus
  CDS (1)..(321)
atggctggatccgttgtccaaattgcaaatttgggggaatataaagatttcatcaaggattctcccgctgtaatcgacttctacgcaacatggtgtggaccatgcaaggtgatctccccaaagtttgtgggactcgcaacagaatacccggctgtgaaatttggtaaagtggatgttgatgacgcatcggaagtatcagaagagtgtggcatcagtgcgatgcctacattccagttctttaagaatggggagaaagtagcagaagtgaaaggagcaagtgaaaaagcactggtggatgccctcaaggaattaataaaatag

SEQ ID NO: 7754 - protein, 106 aa, Strongylocentrotus purpuratus
MAGSVVQIANLGEYKDFIKDSPAVIDFYATWCGPCKVISPKFVGLATEYPAVKFGKVDVDDASEVSEECGISAMPTFQFFKNGEKVAEVKGASEKALVDALKELIK

SEQ ID NO: 7755 - DNA, 318 bp, Tribolium castaneum
  CDS (1)..(318)
atggtcacccacatcaacgataaggccgaccttgtgtcgaagctcaccgatgccggcgaccaacttgtcgtcatcgacttcttcgctacttggtgcgggccatgtaaaatgatttcgccgaaattggaagagttggctcaggaattccaaaacgtgcacattttcaaggtggatgtggacgaatgcgaagatatcgcgatggaatataatatttcgtcaatgcctacttttgttttcgtgaagaatagtcaaacgatcacgcagttcagcggcgccaactatgaaaagctcagacagttggtagtggagaacaagtag

SEQ ID NO: 7756 - protein, 105 aa, Tribolium castaneum
MVTHINDKADLVSKLTDAGDQLVVIDFFATWCGPCKMISPKLEELAQEFQNVHIFKVDVDECEDIAMEYNISSMPTFVFVKNSQTITQFSGANYEKLRQLVVENK

SEQ ID NO: 7757 - DNA, 411 bp, Tribolium castaneum
  CDS (1)..(411)
atgaattcgattttgaagcctaacgccatcagaagcctggccaaggctgtgaacgccagtcgcctaggctgcgtccgtcatggctcgtttaaggtccaggacgacaaggactttctggaaaaggtcgagaacagcaaagaaccggtgattgtggatttctttgcgacgtggtgcggcccttgcaaggcccttgaacctaggttggaaaatatcgttgccaaaagaaacggcaaaatcacgttggctaaggttgacattgattcaatgggcgaactggccgccaaatatgaggtcagtacaattccagctttagtagtttttcgcaatggcaaagtccaggaaaggctgactgggctacaggatgaggacaaactcagtctctgggtggacaaggtcttggaagcaaagtag

SEQ ID NO: 7758 - protein, 136 aa, Tribolium castaneum
MNSILKPNAIRSLAKAVNASRLGCVRHGSFKVQDDKDFLEKVENSKEPVIVDFFATWCGPCKALEPRLENIVAKRNGKITLAKVDIDSMGELAAKYEVSTIPALVVFRNGKVQERLTGLQDEDKLSLWVDKVLEAK

SEQ ID NO: 7759 - DNA, 315 bp, Leptospira interrogans serovar Copenhageni str. Fiocruz L1-130
  CDS (1)..(315): transl_table=11
atggcattggcagaagtcaacgatacaaattttaaaagtgagacatccggaggattggttctcattgattgttgggcggaatggtgtggcccttgtagaatggtggctccggttttggaagaactttccggtgaattggatgggttggtaaaaatcaaaaaactgaatgtagatgataatcaggatacagctcaaagtttagggatttcttccattccgacattgttgctttacaaagacggacaacttgtcgataaagtaattggggcacttccaaaagctcaaattaaaaattttatagaaagacataaataa

SEQ ID NO: 7760 - protein, 104 aa, Leptospira interrogans serovar Copenhageni str. Fiocruz L1-130
MALAEVNDTNFKSETSGGLVLIDCWAEWCGPCRMVAPVLEELSGELDGLVKIKKLNVDDNQDTAQSLGISSIPTLLLYKDGQLVDKVIGALPKAQIKNFIERHK

SEQ ID NO: 7761 - DNA, 324 bp, Desulfovibrio vulgaris subsp. vulgaris str. Hildenborough
  CDS (1)..(324): transl_table=11
atggctgctcagatcaccgatgccactttcgaagcctctgttctcaagtccgccattcccgtgctgatcgacttctgggctccctggtgtgggccgtgccgtgccatggggcccgtcatcgatgaacttgccgccgaatacgagggcaaggtgctcatcgtgaaaatgaacgtcgacgacaatcccgccactcccagcaagtacggcatccgcgccattcccacgctcatcctcttcaagaatggtgaagtggtggaacaggtgaccggggccgtttccaagagcagcatcaaggatatgatcgcccagaaggcactcgggtaa

SEQ ID NO: 7762 - protein, 107 aa, Desulfovibrio vulgaris subsp. vulgaris str. Hildenborough
MAAQITDATFEASVLKSAIPVLIDFWAPWCGPCRAMGPVIDELAAEYEGKVLIVKMNVDDNPATPSKYGIRAIPTLILFKNGEVVEQVTGAVSKSSIKDMIAQKALG

SEQ ID NO: 7763 - DNA, 324 bp, Bartonella henselae str. Houston-1
  CDS (1)..(324): transl_table=11
atgagctgtataaaagttgataagagcaattttgaaagtgaagttttgacttcttctacccctgttgtggttgatttttgggcagaatggtgtggtccttgtaaaatgattgctccgattttagatgaaatttcaatggaaatgcaaaatcaagtcaaaattgccaaagtgaatattgatgaaaatccggaactggctacccaatatggagtgcgctcaattcctaccttattgatgttcaaagatggaaatattgcatcaaatatggttggcgctgcttctaaaggacgtgtttctgaatggattaaagaggggcttcgttaa

SEQ ID NO: 7764 - protein, 107 aa, Bartonella henselae str. Houston-1
MSCIKVDKSNFESEVLTSSTPVVVDFWAEWCGPCKMIAPILDEISMEMQNQVKIAKVNIDENPELATQYGVRSIPTLLMFKDGNIASNMVGAASKGRVSEWIKEGLR

SEQ ID NO: 7765 - DNA, 339 bp, Acinetobacter sp. ADP1
  CDS (1)..(339): transl_table=11
ttggagcaaactatgtctgccaatattgtaaatacaaccgatgctaacttccaagcagacgtgttagatgctgaaacacctgtacttgtagatttttgggcaggctggtgtgcgccatgtaaagctatcgcacctgttttagaagatttgtctcgtgaatacgaaggtaaagtaaaaattgtaaaagttgacgtcactgcatgtgaagatacggctgtgaaatacaatattcgtaatattcctgcacttcttctattcaaagacggtaaagttgttgcacaacaagtcggtgctgcaccgcgctcaaaacttgctgcctttattgatgaaaacgtttaa

SEQ ID NO: 7766 - protein, 112 aa, Acinetobacter sp. ADP1
MEQTMSANIVNTTDANFQADVLDAETPVLVDFWAGWCAPCKAIAPVLEDLSREYEGKVKIVKVDVTACEDTAVKYNIRNIPALLLFKDGKVVAQQVGAAPRSKLAAFIDENV

SEQ ID NO: 7767 - DNA, 327 bp, Erwinia carotovora subsp. atroseptica SCRI1043
  CDS (1)..(327): transl_table=11
atgagcgataaaataattcacctgactgatgacagcttcggtacaaaagtattgcaggctgagggcgctaccctcgttgatttctgggctgagtggtgcggtccttgcaaaatgatcgctcctattctggatgaaattgctgaagaatttgaaggtaaactgacggttaccaagctgaacattgatgaaaatccggctactgcaccgaaatatggtatccgtggtattcctactctgttgctgtttaaaaacggcgaagtcgctgcgacgaaagtcggcgcgctgtccaaagggcaactgaaagagttcctgacggcgaatctgtaa

SEQ ID NO: 7768 - protein, 108 aa, Erwinia carotovora subsp. atroseptica SCRI1043
MSDKIIHLTDDSFGTKVLQAEGATLVDFWAEWCGPCKMIAPILDEIAEEFEGKLTVTKLNIDENPATAPKYGIRGIPTLLLFKNGEVAATKVGALSKGQLKEFLTANL

SEQ ID NO: 7769 - DNA, 327 bp, Yersinia pseudotuberculosis IP 32953
  CDS (1)..(327): transl_table=11
atgagcgataaaattattcacctgagtgacgacagtttcgatactgatgtgctgaaagccagcggcttggtcttagtcgatttctgggctgaatggtgtggtccgtgcaagatgattgctccgattttggatgaaatcgctgaagagtatgaaggtagactgactatcgctaaattgaacattgatgataatcagggcacagcaccaaaatacggtatccgtgggattcctacgctgctgttgttccgtgatggcgaagttgtcgccaccaaggttggtgccttgtctaaggggcaactcaaagcgttcttggatgcaaatctgtaa

SEQ ID NO: 7770 - protein, 108 aa, Yersinia pseudotuberculosis IP 32953
MSDKIIHLSDDSFDTDVLKASGLVLVDFWAEWCGPCKMIAPILDEIAEEYEGRLTIAKLNIDDNQGTAPKYGIRGIPTLLLFRDGEVVATKVGALSKGQLKAFLDANL

SEQ ID NO: 7771 - DNA, 363 bp, Legionella pneumophila subsp. pneumophila str. Philadelphia 1
  CDS (1)..(363): transl_table=11
atgccgacccagactattaacagcgctgaatttgaatcattaattaatgacaatgagatagtttttattgatttctgggctgagtggtgtgctccctgtaagcaattttcaaaagtatatgagcaagtttccgatcaatttccagctattaaatttgttaaagttaacattgaagagcaacaagagttagcagattttttcgagatccgatccatccctcatcttatggttttcaaagacagtattgttatttattctgatgctggaagcatacccgagtccactttaaaagaattggcgcaacaagcacttgatgctgatgttagtgaaatacgagctcagcttgagcagaaggataagtag

SEQ ID NO: 7772 - protein, 120 aa, Legionella pneumophila subsp. pneumophila str. Philadelphia 1
MPTQTINSAEFESLINDNEIVFIDFWAEWCAPCKQFSKVYEQVSDQFPAIKFVKVNIEEQQELADFFEIRSIPHLMVFKDSIVIYSDAGSIPESTLKELAQQALDADVSEIRAQLEQKDK

SEQ ID NO: 7773 - DNA, 330 bp, Methylococcus capsulatus str. Bath
  CDS (1)..(330): transl_table=11
gtgagcagtgacaaaatccttcatgtgaccgacgccgaattcgaagacaaggtcctcaaggcacccggaccggtgctggtggactactgggccgaatggtgcggcccgtgcaagatgatcgctcccatcctcgacgagatcgccggcgaatacgaaggccgcctgaccgtcgccaagctcaacatcgacgacaacccggcgaccccgcagcgttacggtgtgcggggcatccccaccttgatggtattcaagggcggtgaagtggtcgccagcaaggtgggcgcattgaccaaatcccagctcgcggccttcctcgaaggcaatatgtaa

SEQ ID NO: 7774 - protein, 109 aa, Methylococcus capsulatus str. Bath
MSSDKILHVTDAEFEDKVLKAPGPVLVDYWAEWCGPCKMIAPILDEIAGEYEGRLTVAKLNIDDNPATPQRYGVRGIPTLMVFKGGEVVASKVGALTKSQLAAFLEGNM

SEQ ID NO: 7775 - DNA, 327 bp, Azoarcus sp. EbN1
  CDS (1)..(327): transl_table=11
atgagcgagcatatccattacgtcaccgacggcaattttgaagccgaggtgcttcagtcgcagacccccgtgctggtcgactactgggccgaatggtgcggcccgtgcaagatgattgcgccgattctcgacgacgtcgccaaggaatacgccggcaagctgaaagtcgcgaagctcaacatcgacgaaaaccaggagacgcccgccaaattcggcgtgcggggcattccgacgctgatgctgttcaagggcggcaacgtcgaagccacgaaggtcggcgcgctgtcgaagtcccagctcactgccttcattgacagcaacctctga

SEQ ID NO: 7776 - protein, 108 aa, Azoarcus sp. EbN1
MSEHIHYVTDGNFEAEVLQSQTPVLVDYWAEWCGPCKMIAPILDDVAKEYAGKLKVAKLNIDENQETPAKFGVRGIPTLMLFKGGNVEATKVGALSKSQLTAFIDSNL

SEQ ID NO: 7777 - DNA, 348 bp, Synechococcus elongatus PCC 6301
  CDS (1)..(348): transl_table=11
gtgcgctcaaggtttggtcccacgatgtctgcagcaactgagctgaatgatcagcagtttgaatctgccgttctgaaagccccaggattggttctcgtcgatttttgggcgccttggtgcggcccttgtcgcctaattgcaccgctgatggactgggccgcccagacctatgccgatcaactcacggtctacaagctggaagtggatccgaatcccgagacggtagctcgctatcaagttcagggcattccgacgctgttgctgttccaaaacggtgaactggtagagcgcgtcgaaggtgccattggacgcgatcgcattcagaccctgatcaacgcccatctctaa

SEQ ID NO: 7778 - protein, 115 aa, Synechococcus elongatus PCC 6301
MRSRFGPTMSAATELNDQQFESAVLKAPGLVLVDFWAPWCGPCRLIAPLMDWAAQTYADQLTVYKLEVDPNPETVARYQVQGIPTLLLFQNGELVERVEGAIGRDRIQTLINAHL

SEQ ID NO: 7779 - DNA, 324 bp, Dehalococcoides ethenogenes 195
  CDS (1)..(324): transl_table=11
atggtaatggaaataaccgaccagagttttgcggccgaggtactaaaatcagataaacccgtgctggtagatttttgggcaccgtggtgcggcccctgccgcatggtagcccccataatagacaaattatctactaaatacgaaggcaagtttaaattttgcaagctgaatgtagatgaaaataaaactactgccgcccaataccgggttatgtccatacctaccctgctgtttttcaagagcggtcaggtagctgacatggtggtaggtgcagtacccgaatctgccttaagccagaagattgaccagttactccagaagtaa

SEQ ID NO: 7780 - protein, 107 aa, Dehalococcoides ethenogenes 195
MVMEITDQSFAAEVLKSDKPVLVDFWAPWCGPCRMVAPIIDKLSTKYEGKFKFCKLNVDENKTTAAQYRVMSIPTLLFFKSGQVADMVVGAVPESALSQKIDQLLQK

SEQ ID NO: 7781 - DNA, 327 bp, Psychrobacter arcticus 273-4
  CDS (1)..(327): transl_table=11
atgtcagaccttattattaataccaccgatgccaactttgaccaagacgtcctgcaatctgacgtgccagtcttagtagatttttgggcaacgtggtgtggtccttgtaaagccatcgcacctattttagaagatttagcaactgagtaccaaggtaaagttaaaatcgttaaagttgacgttgataacaacccacaagcagcaagtcgttttggtatccgtaacattcctaccctatttgtctttaaaggtggtgaaaaagtagattcagtaatgggcctacagccaaaagctgaattggcaaaagtgttagataagcatttgtaa

SEQ ID NO: 7782 - protein, 108 aa, Psychrobacter arcticus 273-4
MSDLIINTTDANFDQDVLQSDVPVLVDFWATWCGPCKAIAPILEDLATEYQGKVKIVKVDVDNNPQAASRFGIRNIPTLFVFKGGEKVDSVMGLQPKAELAKVLDKHL

SEQ ID NO: 7783 - DNA, 324 bp, Prochlorococcus marinus str. NATL2A
  CDS (1)..(324): transl_table=11
atgtccacagcttctgcagtaactgattcctctttcgaacaagaagtcctccagagcgatgttcctgttttggttgatttttgggcaccttggtgcggaccatgcagaatggttgctccaattgtcgaagagatctcaaaagactttgaaggcaaaataaaagtttacaaattgaataccgatgagaatcctaatgttgctagtcagtatgggataagaagcatcccaacgctgatgatctttaaaggaggtcagaaagtagataccgttgtgggagcagtccctaaagccaccctctcaggaacaatttccaaacatctctaa

SEQ ID NO: 7784 - protein, 107 aa, Prochlorococcus marinus str. NATL2A
MSTASAVTDSSFEQEVLQSDVPVLVDFWAPWCGPCRMVAPIVEEISKDFEGKIKVYKLNTDENPNVASQYGIRSIPTLMIFKGGQKVDTVVGAVPKATLSGTISKHL

SEQ ID NO: 7785 - DNA, 333 bp, Ehrlichia canis str. Jake
  CDS (1)..(333): transl_table=11
atggtatcagtaatgatcgagcaaattagtgatagtgatttccacagtaaagttatatcttgcaatgaagacatactaattttagtagatttttgggctccatggtgtggaccttgcaaaactttagaaccacaacttgaaaagttagcacagcagtacgctgaacaggtgaagatatacaagttgagcattgaagataaccaagatgttgctattcaatatggagttagtgcagtaccaactactttgatgtttaaaaacggaaaaaaactatcacaagttattggagctgacattgcaaagataataaatgaactaaacaaccacatttaa

SEQ ID NO: 7786 - protein, 110 aa, Ehrlichia canis str. Jake
MVSVMIEQISDSDFHSKVISCNEDILILVDFWAPWCGPCKTLEPQLEKLAQQYAEQVKIYKLSIEDNQDVAIQYGVSAVPTTLMFKNGKKLSQVIGADIAKIINELNNHI

SEQ ID NO: 7787 - DNA, 429 bp, Thiobacillus denitrificans ATCC 25259
  CDS (1)..(429): transl_table=11
atggaactcgcctgcccccactgcctcgccgtcaaccgcgtgcccgacgagcgcctcgccgagtcgccgaagtgcggcaagtgcggcgccgtgctcctgccggcaaagccactcgacctgacggccgacagcttcgaccgcttcatcgcacgcgccggcctgccggttctcgtcgacttctgggccgagtggtgcggcccatgcaagatgatggcgcccgtgttccagcaggtcgcagccgagatggcgacgcgggtgcgcttcgccaaggtcgacaccgaggccgagccgcaggtctcgatgcgccatcacatcaagggcatcccgagcctgatcctgttccgcaacggcgccgaggccgcgcgcacgtcgggcgcgatggacggccatgcgctgaaacgctggctcgcggcgcaagggattcgatag

SEQ ID NO: 7788 - protein, 142 aa, Thiobacillus denitrificans ATCC 25259
MELACPHCLAVNRVPDERLAESPKCGKCGAVLLPAKPLDLTADSFDRFIARAGLPVLVDFWAEWCGPCKMMAPVFQQVAAEMATRVRFAKVDTEAEPQVSMRHHIKGIPSLILFRNGAEAARTSGAMDGHALKRWLAAQGIR

SEQ ID NO: 7789 - DNA, 327 bp, Anabaena variabilis ATCC 29413
  CDS (1)..(327): transl_table=11
atgcctactgatacagttgcttacgttcaagaaaatgaatttgatgctgttttaagtgaagataaagtcgttgtcgttgactttacggctacttggtgtggcccatgtcgtcttgttagtccgttaatggatcaacttgctgatgagtacaaaggtcgcgttaaaatagttaaggtagacgtagacaacaataaacctctgttcaagaaatttggacttcgcagcattccagcagtgttaatttttaaagatggtgagttagcagaaaagattgtgggagtttctccttatgagcaattcagtgcagctgtagaaaagcttctttag

SEQ ID NO: 7790 - protein, 108 aa, Anabaena variabilis ATCC 29413
MPTDTVAYVQENEFDAVLSEDKVVVVDFTATWCGPCRLVSPLMDQLADEYKGRVKIVKVDVDNNKPLFKKFGLRSIPAVLIFKDGELAEKIVGVSPYEQFSAAVEKLL

SEQ ID NO: 7791 - DNA, 327 bp, Burkholderia sp. 383
  CDS (1)..(327): transl_table=11
atgagcgaacagatcaaacacatcagcgacgcatcgttcgaacaggacgtcgtcaagtccgacaagcccgtgctcgtcgatttctgggccgaatggtgcggcccgtgcaagatgatcgccccgatcctcgacgaagtcgcgaaggattacggcgacaagctgcagatcgcgaagatcaacgtcgacgacaaccaggcaacgcccgcgaagttcggcgtgcgcggcatcccgacgctgatcctgttcaagaacggcgcggccgccgcgcagaaggtcggcgcgctgtcgaagtcgcagctcaccgcattcctggacagccacctgtaa

SEQ ID NO: 7792 - protein, 108 aa, Burkholderia sp. 383
MSEQIKHISDASFEQDVVKSDKPVLVDFWAEWCGPCKMIAPILDEVAKDYGDKLQIAKINVDDNQATPAKFGVRGIPTLILFKNGAAAAQKVGALSKSQLTAFLDSHL

SEQ ID NO: 7793 - DNA, 321 bp, Novosphingobium aromaticivorans DSM 12444
  CDS (1)..(321): transl_table=11
atgccgaccaaagccgtcaccgacgccagcttcgccagcgatgtcctgggcagcagcaagcccgtgctcgtcgatttctgggcggactggtgcggcccctgcaagatgatcgccccggcgctcgaggagatcgccgaggagcttggcgacaaggtcgagatcgccaaggtcgacatcatggaaaacacggacaccgccagcaagttcggcgtccagtcgatcccgctgctgatcctcttcaaggacggtcagcccgtggcgcagaagcttggcgcagcgccgaagagccagctcaagggctggctggaaagcgttctctga

SEQ ID NO: 7794 - protein, 106 aa, Novosphingobium aromaticivorans DSM 12444
MPTKAVTDASFASDVLGSSKPVLVDFWADWCGPCKMIAPALEEIAEELGDKVEIAKVDIMENTDTASKFGVQSIPLLILFKDGQPVAQKLGAAPKSQLKGWLESVL

SEQ ID NO: 7795 - DNA, 327 bp, Saccharophagus degradans 2-40
  CDS (1)..(327): transl_table=11
atgagtgaagcaatcgtacaagtaagcgatgctagctttgagcaggacgtattgtcctccgatatacctgtattagttgactactgggcagcgtggtgtggtccatgcaaaatgatcgcccccgttcttgacgagctagcaaaagaatacgaaggcaaaattaaaatttgcaaaatggatgtagacgccaacaaagaaacaccggctaaatacaacattcgcggcattcctactttgattatgttcaaaggaggcaacgcagaaggcactaaagttggcgctttatctaaagctcaacttaaagagtttatcgacgcgagcctataa

SEQ ID NO: 7796 - protein, 108 aa, Saccharophagus degradans 2-40
MSEAIVQVSDASFEQDVLSSDIPVLVDYWAAWCGPCKMIAPVLDELAKEYEGKIKICKMDVDANKETPAKYNIRGIPTLIMFKGGNAEGTKVGALSKAQLKEFIDASL

SEQ ID NO: 7797 - DNA, 327 bp, Ralstonia metallidurans CH34
  CDS (1)..(327): transl_table=11
atgagcgaacaaatcaaatatgtgagcgacgcttcgttcgatgccgacgtgctcaagtccgacaagcccgtgctgctcgacttctgggccgaatggtgcggtccttgcaagatgatcgccccgatcctggacgaagtcgcgaaggactacggcgacaaggtgcaggtcgccaaaatcaacgtggatgaaaaccagcaagtgccggccaagttcggcattcgcggcatcccgacgctgatcctgttcaagaacggccaagtggccgcgcagaaggttggcgcgctgtcgaagtcgcagctgaccgcgttcctggacagccagctgtaa

SEQ ID NO: 7798 - protein, 108 aa, Ralstonia metallidurans CH34
MSEQIKYVSDASFDADVLKSDKPVLLDFWAEWCGPCKMIAPILDEVAKDYGDKVQVAKINVDENQQVPAKFGIRGIPTLILFKNGQVAAQKVGALSKSQLTAFLDSQL

SEQ ID NO: 7799 - DNA, 321 bp, Silicibacter sp. TM1040
  CDS (1)..(321): transl_table=11
atgtccaccgtagccgttaccgacgccaccttcgacgccgaagtcaagaattccgatgtccccgttgtggtggacttctgggccgaatggtgtggcccgtgcaaacagatcggccccgctctggaagagctggcagccgagtatggcgacaaggtaaaaatcgccaaggttgatgtcgacagcaacccgaatgccgctgctgccatgggtgtgcgcggcattccagctctgttcgtgttcaaggatggtcaggtggtttccaaccgcgccggcgccgctcccaaggccgcgctcaagagctggatcgacgaatccatctga

SEQ ID NO: 7800 - protein, 106 aa, Silicibacter sp. TM1040
MSTVAVTDATFDAEVKNSDVPVVVDFWAEWCGPCKQIGPALEELAAEYGDKVKIAKVDVDSNPNAAAAMGVRGIPALFVFKDGQVVSNRAGAAPKAALKSWIDESI

SEQ ID NO: 7801 - DNA, 333 bp, Myxococcus xanthus DK 1622
  CDS (1)..(333): transl_table=11
atggcaggcgcggacgtgacgaacatcggggatggcgatttcaagcagcaggtcctggactcccaggagcccgtgctggtggatttctgggcgacgtggtgcgcgccgtgccgcgccatcgcgccctccatcgaagcgctggcctcgcagtacaaggggcaggtgaagttcgccaagctcaacatcgatgagaaccaggacacgccgcaggagtacggcatccgttccatccccaccctgctcctgttcaagggcggccgcgtggtggagcagattgtcggcgcggtgcccaaggcccgcatcgaagaggcggtgaagaaggccctgacgtag

SEQ ID NO: 7802 - protein, 110 aa, Myxococcus xanthus DK 1622
MAGADVTNIGDGDFKQQVLDSQEPVLVDFWATWCAPCRAIAPSIEALASQYKGQVKFAKLNIDENQDTPQEYGIRSIPTLLLFKGGRVVEQIVGAVPKARIEEAVKKALT

SEQ ID NO: 7803 - DNA, 324 bp, Mesorhizobium sp. BNC1
  CDS (1)..(324): transl_table=11
atggccacggtgaaagtcgatagcggcaattttcaatccgatgttctgcaggcctgcgagcccgtggtggtggatttctgggcagaatggtgcggcccctgcaagatgatcgcgcctgccctggaagagatttcatcggaaatgcaaggcaaggtgaaagtcgccaagctcaatatcgacgagaaccccgaacttgccgcacggtatggcgtgcgctcgatccccacgctcatgctgttcaagaatggcgaagtggcggatatgaaggttggagcagccccgaagacggctttgtcggcttggatcggcggttccatcgcataa

SEQ ID NO: 7804 - protein, 107 aa, Mesorhizobium sp. BNC1
MATVKVDSGNFQSDVLQACEPVVVDFWAEWCGPCKMIAPALEEISSEMQGKVKVAKLNIDENPELAARYGVRSIPTLMLFKNGEVADMKVGAAPKTALSAWIGGSIA

SEQ ID NO: 7805 - DNA, 330 bp, Trichodesmium erythraeum IMS101
  CDS (1)..(330): transl_table=11
atgtcaaatacaaatccagtaactgatgctagtttcaaggaagaggtgcttgagagtaatattccagtgttagtagatttctgggcaccttggtgcgggccatgcaggatggttgctcctgtagttgaagatatatcaaagcaatatgaaggacaagtcaaagtagtgaaattaaatactgacgagaatcctaatgtagcaagccagtatgggattcgtagtattcctaccttgatgatatttaagggaggggaaagagttgatatggttgtgggtgccgttcctaagactacattagctaatactttagacaaatacattgaaaaatga

SEQ ID NO: 7806 - protein, 109 aa, Trichodesmium erythraeum IMS101
MSNTNPVTDASFKEEVLESNIPVLVDFWAPWCGPCRMVAPVVEDISKQYEGQVKVVKLNTDENPNVASQYGIRSIPTLMIFKGGERVDMVVGAVPKTTLANTLDKYIEK

SEQ ID NO: 7807 - DNA, 321 bp, Rhizobium leguminosarum bv. viciae 3841
  CDS (1)..(321): transl_table=11
atggctaccgtgaaagtcgatatcaataacttccagtcggaagttctggaatccgcagaacccgtcgtcgtcgatttctgggccgaatggtgcggcccgtgcaagatgattgctccgagcctcgaagaaatcgccgtcgagatggaaggcaaggtcaaggtcgccaagctgaatatcgatgagaatccggaactcgccgcacagtttggtgtgcgctccattccgacccttgcaatcttcaagggcggcgaagttgccgatatctcggtcggcgcaaagccgaagacggctctttcgaactggatttcgagcgctgcctga

SEQ ID NO: 7808 - protein, 106 aa, Rhizobium leguminosarum bv. viciae 3841
MATVKVDINNFQSEVLESAEPVVVDFWAEWCGPCKMIAPSLEEIAVEMEGKVKVAKLNIDENPELAAQFGVRSIPTLAIFKGGEVADISVGAKPKTALSNWISSAA

SEQ ID NO: 7809 - DNA, 354 bp, Mycobacterium avium 104
  CDS (1)..(354): transl_table=11
atgaccgacgccgaaaaggccatcgccacaatagaagtctccgacgcatcgttttccaccgatgtgttggccagcaataagcctgtgctggttgacttttgggcgacatggtgtggtccctgcaagatggttgcgccggtgctcgaggaaatcgccagcgagcgcggcgatcacctcaccgtcgccaagctcgacgtcgacgccaacccggaaaccgcccaaaacttccaggtggtctccattcccaccctgatcctgttcaaggacggccagcccgtgaagcggatcgtcggcgccaagggcaaggcggcgctgctgcgtgagctttccgacgcggttcccaacctcggctga

SEQ ID NO: 7810 - protein, 117 aa, Mycobacterium avium 104
MTDAEKAIATIEVSDASFSTDVLASNKPVLVDFWATWCGPCKMVAPVLEEIASERGDHLTVAKLDVDANPETAQNFQVVSIPTLILFKDGQPVKRIVGAKGKAALLRELSDAVPNLG

SEQ ID NO: 7811 - DNA, 381 bp, Nocardioides sp. JS614
  CDS (1)..(381): transl_table=11
atgaccaccaccacgctgactgccgcgcagttcgaggagaccgtgaccgggaacgacatcgtcctggtcgacttctgggcctcctggtgcggcccgtgccgccagttcgcccccgtcttcgaggccgcgtcggagaagcaccccgacgtcgtgttcggcaaggtcgacaccgaggccgagcgcgagctcgccgcggccgcgcagatcacctcgatcccgacgctgatggccttccgcgagggcgtgctcgtcttcgcccagccgggcgccctgccggcgacctcgctggagcaggtgatcggcgccgtccgcgagctcgacatggacgacgtccgcgcccagctcgccgcccagagccaggaccaggaggagaaccagtga

SEQ ID NO: 7812 - protein, 126 aa, Nocardioides sp. JS614
MTTTTLTAAQFEETVTGNDIVLVDFWASWCGPCRQFAPVFEAASEKHPDVVFGKVDTEAERELAAAAQITSIPTLMAFREGVLVFAQPGALPATSLEQVIGAVRELDMDDVRAQLAAQSQDQEENQ

SEQ ID NO: 7813 - DNA, 324 bp, Nostoc punctiforme PCC 73102
  CDS (1)..(324): transl_table=11
atgtcaacagccgcacaagttaccgattctagtttcaagcaagaagtactcgacagcgatgtacccgttttagttgacttttgggcaccctggtgcggaccatgccgtatggtagctcctgttgtcgatgaaatctccgaacagtacaaaggtcaaatcaaggtcgtcaaagtcaacacggatgaaaatcctcaagttgctagtcagtacggcatccgcagtattcctacattaatgatttttaaagatggacaaaaagtagatatggtggtaggtgctgtacctaaaagtacattagcttccactttagaaaagtatctttga

SEQ ID NO: 7814 - protein, 107 aa, Nostoc punctiforme PCC 73102
MSTAAQVTDSSFKQEVLDSDVPVLVDFWAPWCGPCRMVAPVVDEISEQYKGQIKVVKVNTDENPQVASQYGIRSIPTLMIFKDGQKVDMVVGAVPKSTLASTLEKYL

SEQ ID NO: 7815 - DNA, 375 bp, Bifidobacterium longum DJO10A
  CDS (1)..(375): transl_table=11
atggcaaccaccgccatcacctccgccgatttcgagaagaccatcaccgacaacgaaatcgtgttcgttgacttctgggccacctggtgcggcccgtgccgcgcgttcggcccgattttcgaggcggcctccaacgagccggagaacgcgaacatcgccttcgtcaaggttgatatcgacgccaaccaggatctggcccaggccgccggcatccaggcggtgcccacactgatgatcgccaagcagggcgaggtcatcttccagcaggccggcgcgctgcaggccgccgatctcgacgatctgatcgcccaggccaaggcactcgatctggccgccgccaaggccgcccagtccggtgccgaccagcaggcctga

SEQ ID NO: 7816 - protein, 124 aa, Bifidobacterium longum DJO10A
MATTAITSADFEKTITDNEIVFVDFWATWCGPCRAFGPIFEAASNEPENANIAFVKVDIDANQDLAQAAGIQAVPTLMIAKQGEVIFQQAGALQAADLDDLIAQAKALDLAAAKAAQSGADQQA

SEQ ID NO: 7817 - DNA, 318 bp, Actinobacillus pleuropneumoniae serovar 1 str. 4074
  CDS (1)..(318): transl_table=11
atgactttacaagttactgacgcaacttttgaacaagaagtattaaaatcggacgtaccggtattattagacttttgggcgccgtggtgcggtccttgccgtatggtggctccaatcttagacgaattatcggaagagttcgcgggtcgtgcgaaaattgctaaagtgaacgtggacgagaaccaacaaattccggcacaattcggtattcgttcaatcccgacgttaatccttttcaaaaacggtgaagtggttgcaactcaagtcggcgcattaccgaaatcacaattaagcgcatttgtcgaacaagcgctttaa

SEQ ID NO: 7818 - protein, 105 aa, Actinobacillus pleuropneumoniae serovar 1 str. 4074
MTLQVTDATFEQEVLKSDVPVLLDFWAPWCGPCRMVAPILDELSEEFAGRAKIAKVNVDENQQIPAQFGIRSIPTLILFKNGEVVATQVGALPKSQLSAFVEQAL

SEQ ID NO: 7819 - DNA, 324 bp, Crocosphaera watsonii WH 8501
  CDS (1)..(324): transl_table=11
atgtcagctgcagttcaagttacagatggtacttttaaagcagatgttttagacagcgacgttcccgttctcgtggatttttgggcgccttggtgtggtccttgtcgtatggtcgctcccgttgtagaggaaatagcagaccaatacgccggtcaggttaaggttgttaagctcaacacggacgaaaatcctaacactgctagtcaatatggcattcgtagtatccccactctgatgatcttcaagggaggtcaacgagtggatatggttgtgggtgctgttcctaaaacaaccctcgcttctactttggaaaagtatctttaa

SEQ ID NO: 7820 - protein, 107 aa, Crocosphaera watsonii WH 8501
MSAAVQVTDGTFKADVLDSDVPVLVDFWAPWCGPCRMVAPVVEEIADQYAGQVKVVKLNTDENPNTASQYGIRSIPTLMIFKGGQRVDMVVGAVPKTTLASTLEKYL

SEQ ID NO: 7821 - DNA, 321 bp, Roseovarius nubinhibens ISM
  CDS (1)..(321): transl_table=11
atggccaccgtagccgttaccgacgacacgttcgacgccgaagtgaaaaattcagacatccccgtcgtggtggatttctgggccgaatggtgcggcccctgcaaacagatcggcccggctctggaagagatcgccgccgagatgggtggcaaggtgaaaatcgccaaggtcgatgtcgacagcaacccgaactccgccgctcagatgggcgtgcgcggcattcctgcgctgttcatcttcaagaatggcgaagtggtctcgaaccgcgctggcgccgcccccaaggccgcactccagagctggatcgaagagtcgatctaa

SEQ ID NO: 7822 - protein, 106 aa, Roseovarius nubinhibens ISM
MATVAVTDDTFDAEVKNSDIPVVVDFWAEWCGPCKQIGPALEEIAAEMGGKVKIAKVDVDSNPNSAAQMGVRGIPALFIFKNGEVVSNRAGAAPKAALQSWIEESI

SEQ ID NO: 7823 - DNA, 357 bp, Erythrobacter sp. NAP1
  CDS (1)..(357): transl_table=11
atgaagggcgaagacccactttcaggagaagccattatggcaaccgtcaacgtcaccgatgagagcttcaagagcgacgtgctcgagagcgacaagcccgttctggtcgatttctgggccgattggtgcggcccgtgcaagatgattgcacccgcactcgaagagatcagcaacgaactcggcgagcaggtcaccatcgccaagatggacattatggaaaacaccggaatccccgctgaaatgggtgttcagtcgatcccgctgatggtcctattcaagaatggcgaagcggttgctcgcaaggtcggagccgctcccaaaagccagctcaaggactggctcgaaagcgagatctaa

SEQ ID NO: 7824 - protein, 118 aa, Erythrobacter sp. NAP1
MKGEDPLSGEAIMATVNVTDESFKSDVLESDKPVLVDFWADWCGPCKMIAPALEEISNELGEQVTIAKMDIMENTGIPAEMGVQSIPLMVLFKNGEAVARKVGAAPKSQLKDWLESEI

SEQ ID NO: 7825 - DNA, 327 bp, Pseudoalteromonas tunicata D2
  CDS (1)..(327): transl_table=11
atgagcgacaaaataatccaattaaccgatgatagtttcgaaactgacgtattaaaagctgacaaaccagtgcttgttgacttttgggctgagtggtgtggtccttgtaaaatgatcgcccctattttagatgacgttgcaagtgaatatgctgatcgcgttgttgttggtaagctaaacatcgaccaaaactctgcaacaccaccaaaatttggtattcgtggcatcccaacattattgttatttaaagatggccaagttgctgcaactaaagttggtgcattatctaaaactcaactaattgaatttttagaaaataacatctaa

SEQ ID NO: 7826 - protein, 108 aa, Pseudoalteromonas tunicata D2
MSDKIIQLTDDSFETDVLKADKPVLVDFWAEWCGPCKMIAPILDDVASEYADRVVVGKLNIDQNSATPPKFGIRGIPTLLLFKDGQVAATKVGALSKTQLIEFLENNI

SEQ ID NO: 7827 - DNA, 321 bp, Xanthobacter autotrophicus Py2
  CDS (1)..(321): transl_table=11
atgtcggtcgagaaggtttcggatcagaattttgagcaggacgtgcttcagtccagcgcgccggtcatcgtggacttctgggccgagtggtgcggcccctgccgcatggtcgcccccatcctcgaggaagtctctggcgagatgggcgagaagatccgtatcgtgaagctgaacgtggacgagaatcctgccaccgcttccaagtacggcatcatgtccatccccaccctgctgctgttcaaggacggcaagatcgcctcccgccaggtcggcgccgcccccaaggcgaagctggtgcagtggatcaacggcgccatctga

SEQ ID NO: 7828 - protein, 106 aa, Xanthobacter autotrophicus Py2
MSVEKVSDQNFEQDVLQSSAPVIVDFWAEWCGPCRMVAPILEEVSGEMGEKIRIVKLNVDENPATASKYGIMSIPTLLLFKDGKIASRQVGAAPKAKLVQWINGAI

SEQ ID NO: 7829 - DNA, 327 bp, marine gamma proteobacterium HTCC2207
  CDS (1)..(327): transl_table=11
atgagcgacgctatcgttcacacaacagattctagctttgaaagcgatgtattacagtcagatattccagcactggtagatttttgggcggcctggtgtggtccctgcaaaatgatcgccccactgctcgacgaactctccactgaatatgcaggacgcgtaaagatctgcaaagtagatgtagatgctagtccagagacagcggcaaaatttaatgttcgcggcattccaacactgctggtgtttaaaaatggcacagtagaagcaacaaaagtaggcgctctatccaaagcccaactggtcgaatttgtcgacagcattttgtaa

SEQ ID NO: 7830 - protein, 108 aa, marine gamma proteobacterium HTCC2207
MSDAIVHTTDSSFESDVLQSDIPALVDFWAAWCGPCKMIAPLLDELSTEYAGRVKICKVDVDASPETAAKFNVRGIPTLLVFKNGTVEATKVGALSKAQLVEFVDSIL

SEQ ID NO: 7831 - DNA, 330 bp, delta proteobacterium MLMS-1
  CDS (1)..(330): transl_table=11
atggccagtgacaagctagtacaagtttccgatgccgattttgacagccaggtattacagagcgccgagccggtgctggtggatttctgggccccctggtgcggcccctgcaaggccatcggcccggtggtggaggagttggccgacgaatatgccggcaaggccaaaatcgccaagatgaacgtcgatgacaaccccgccacccccggcaaatacggtatccgggcgatccccaccctgatcctgttcaaaggcggcgaggtggtggatcaggtcaccggcgccgttggcaaaccccagcttaccgccctgatcgacaagggaatgtaa

SEQ ID NO: 7832 - protein, 109 aa, delta proteobacterium MLMS-1
MASDKLVQVSDADFDSQVLQSAEPVLVDFWAPWCGPCKAIGPVVEELADEYAGKAKIAKMNVDDNPATPGKYGIRAIPTLILFKGGEVVDQVTGAVGKPQLTALIDKGM

SEQ ID NO: 7833 - DNA, 354 bp, Rickettsiella grylli
  CDS (1)..(354): transl_table=11
atgaataattcatctatcgtgacgctgaatgatgcgtcttttgaatcagaagtattacaatttaacgcaacaccgatactcgttgatttttgggcagaatggtgtggcccctgcaaagccatttcacctattttagataaactttctgaaaaatatcgtgggaaaataaagattggaaaattaaatgttgacgaaaaccctaaaacaccggcaaaatacggggtgcgtggcattcctacattaattctttttaaagatggaaaagccgtagaaacaaaagtgggtgccttattagaatcacagttagaatcatttttagagaaacacctaacgaacccaggtacttctacttaa

SEQ ID NO: 7834 - protein, 117 aa, Rickettsiella grylli
MNNSSIVTLNDASFESEVLQFNATPILVDFWAEWCGPCKAISPILDKLSEKYRGKIKIGKLNVDENPKTPAKYGVRGIPTLILFKDGKAVETKVGALLESQLESFLEKHLTNPGTST

SEQ ID NO: 7835 - DNA, 354 bp, Medicago truncatula; identical to SEQ ID NO: 1210
  CDS (1)..(354)

SEQ ID NO: 7836 - protein, 117 aa, Medicago truncatula; identical to SEQ ID NO: 1211

SEQ ID NO: 7837 - DNA, 363 bp, Medicago truncatula; identical to SEQ ID NO: 1212
  CDS (1)..(363)

SEQ ID NO: 7838 - protein, 120 aa, Medicago truncatula; identical to SEQ ID NO: 1213

SEQ ID NO: 7839 - DNA, 405 bp, Medicago truncatula; identical to SEQ ID NO: 1214
  CDS (1)..(405)

SEQ ID NO: 7840 - protein, 134 aa, Medicago truncatula; identical to SEQ ID NO: 1215

SEQ ID NO: 7841 - DNA, 327 bp, Aspergillus niger
  CDS (1)..(327)
atgtctcacaaggttcacgacatcacctctaaggccgagttcgccgagaaggttaccaactccaccgacgccatcgtccttgactgcttcgctacctggtgcggtccttgcaaggctatctcccccaaggtcgaggagttcagcaacacctaccccaacgccaagttctacaagatcgacgtcgacgaactgtccgaggttgctgccgagctcggtatccgtgccatgcccactttcctgctcttcaaggacggcaagaagttcgacgacctcaccggtgccaaccccaagggtctggagcagaagatccaggctctgcttgcataa

SEQ ID NO: 7842 - protein, 108 aa, Aspergillus niger
MSHKVHDITSKAEFAEKVTNSTDAIVLDCFATWCGPCKAISPKVEEFSNTYPNAKFYKIDVDELSEVAAELGIRAMPTFLLFKDGKKFDDLTGANPKGLEQKIQALLA

SEQ ID NO: 7843 - DNA, 327 bp, Aspergillus niger
  CDS (1)..(327)
atgtctcacggaaaggttattgaggttgataaccctgttatcttcaaggcgcttacctccaacggtcccgtggtcgtcgacttcttcgcaacctggtgcggtccgtgcaaggccgtcgcgccagtggtcggcaagctcagcgaaacctacaccaatgtgcgcttcattcaggtcgacgttgataaggtccgttcggtggcacaggaactggaggtgcgcgctatgcccactttcgtcctgtacaaggatggccagctgcaggagaagcgcgtcgtgggtggaaacatgaaggagctggaggcagccatcaaggaaattactgcataa

SEQ ID NO: 7844 - protein, 108 aa, Aspergillus niger
MSHGKVIEVDNPVIFKALTSNGPVVVDFFATWCGPCKAVAPVVGKLSETYTNVRFIQVDVDKVRSVAQELEVRAMPTFVLYKDGQLQEKRVVGGNMKELEAAIKEITA

SEQ ID NO: 7845 - DNA, 1068 bp, Aspergillus niger
  CDS (1)..(1068)
atgtcgacactcgtgcaaatcaactcacgcgagcaattcagctctcttttgagctcctccacctttgttgtcgccgacttctacgcagattggtgcggaccatgcaaagccatcgccccagcatacgagcagctagcttcgcagctctcacgcccgaacaagatcacctttacgaaggtcaacgttgacaagaaccaagacatcgcaaggcagtatgggattacagcaatgcccaccttcgtcctcttcgaacgcggccgcccaacctccaccgtccgcggcgccaacgccaaagagctcaacgacctagtccgcaagctcgccacggaagccgaaaaagcgcccgagggcaacgacgccggctccagcagcggcgtaggctggatcggcgccccggctcccaagaactacagcgacatctcagaccaatacgacccgaagggcctggagctactgaaccgggcgagcgagttcggcacggccaagaccctcttcgatagctcgaagccatcctccttgaacaacgccaagggcaaggccggggcggcaccggattgggtggagagtgatacggacgagcagctgatgctgtttatcccgttccagtctacgctgaaggtgcattcgttgcagattacgtcgcttccgccatcggcggacgaggaggttgaggatgaggacgagcggccgatgcgtcctcgtacagtgtcgttgtatacgaatcggtcgcatgtgctgggattcgatgaggcagatgatatccctgctgtgcagacggttacgattcagccggaggattgggatccgaagacgggtacggcgaaggtagatttgcggttcgtcaagttccagagcgttacgtcgttggtgattttctttgtggatggagatggggatagtgagaagctgcgggttgatcgggtgcgcatttttggagaggcaggtgagaagagagagatgggcaagttggagaagattggtgatgagccggagaaaccatcactatgctcctacatggacagtagacacattcacacttataatgacattcatattcaataccaataa

SEQ ID NO: 7846 - protein, 355 aa, Aspergillus niger
MSTLVQINSREQFSSLLSSSTFVVADFYADWCGPCKAIAPAYEQLASQLSRPNKITFTKVNVDKNQDIARQYGITAMPTFVLFERGRPTSTVRGANAKELNDLVRKLATEAEKAPEGNDAGSSSGVGWIGAPAPKNYSDISDQYDPKGLELLNRASEFGTAKTLFDSSKPSSLNNAKGKAGAAPDWVESDTDEQLMLFIPFQSTLKVHSLQITSLPPSADEEVEDEDERPMRPRTVSLYTNRSHVLGFDEADDIPAVQTVTIQPEDWDPKTGTAKVDLRFVKFQSVTSLVIFFVDGDGDSEKLRVDRVRIFGEAGEKREMGKLEKIGDEPEKPSLCSYMDSRHIHTYNDIHIQYQ

SEQ ID NO: 7847 - DNA, 321 bp, Aspergillus niger
  CDS (1)..(321)
atggctgtcactgctatcgaaagtatctctgacttcctcaccctcatcaactcgggagatgtggtgatcatcgacttctgggctacatggtgtggtccttgcaaaatgattagtcctttctttgaacagctggcctcccggcccgagttcagcgccatcaagttcgccaaggtcgacgtcgatacacaggaggatatttctcaagaatgtggaattagagccatgccgacctttatagtattcaaagatggccaaaagctggacgatatggcgggagctcaccccggtggcctgcaaggtcttgttcagaagtatgcgtga

SEQ ID NO: 7848 - protein, 106 aa, Aspergillus niger
MAVTAIESISDFLTLINSGDVVIIDFWATWCGPCKMISPFFEQLASRPEFSAIKFAKVDVDTQEDISQECGIRAMPTFIVFKDGQKLDDMAGAHPGGLQGLVQKYA

SEQ ID NO: 7849 - DNA, 354 bp, Eucalyptus grandis; identical to SEQ ID NO: 1232
  CDS (1)..(354)

SEQ ID NO: 7850 - protein, 117 aa, Eucalyptus grandis; identical to SEQ ID NO: 1233

SEQ ID NO: 7851 - DNA, 672 bp, Curvularia lunata
  CDS (145)..(483)
gcacgaggaaactcggagaaacgctgcctcatctgccatcacaaatacactcatcagcttttgcactctcccctcaaccccacctcgaccaccaacctttaccgtccactcttcaccccgcgcttcttttcaaacaccgccagaatgagcgaagaaaccaagcagggcgttcacaacctcgccaacaaggcccaattcgaggctgctatcaacgacaaggagaccctcatggtcctcgactgcttcgcgacatggtgtggtccttgcaaggtgattgctccccaagttgtcaagctctctgagaagtaccccaacgcccgcttcttcaagctcgacgtcgatgacgttcccgacgtcgcccaggaactcggtatccgcgctatgcccaccttccttttgttcaagggcggcgacaagatcagcgaggttgttggtgccaaccccaaggcacttgaggccgccatccagtccaactacgagtaggagacatctgtcccaacacatttggactttttcttagaaagcacaaccgatctagtctgactagctcggtccctacattgcatgcatttgcgttgtgcaaggtggattgaatagcgatctaaatagggaatgcgcatcgccacagcatttttctgaatacaaaaatatctcacaaaaaaaaaaaaaaaa

SEQ ID NO: 7852 - protein, 112 aa, Curvularia lunata
MSEETKQGVHNLANKAQFEAAINDKETLMVLDCFATWCGPCKVIAPQVVKLSEKYPNARFFKLDVDDVPDVAQELGIRAMPTFLLFKGGDKISEVVGANPKALEAAIQSNYE

SEQ ID NO: 7853 - DNA, 372 bp, Solanum berthaultii; identical to SEQ ID NO: 1240
  CDS (1)..(372)

SEQ ID NO: 7854 - protein, 123 aa, Solanum berthaultii; identical to SEQ ID NO: 1241

SEQ ID NO: 7855 - DNA, 324 bp, Aspergillus oryzae
  CDS (1)..(324)
atggctgaagttactcctcttaacagcctttccgagttccaaactctcatcaattcgggccaagtggtcataatcgacttttgggctccatggtgtggtccatgccgaatgataagcccagtctttgaaaggctggcctccgatccacagtacagttcgatcaagtttgtcaaggtggatgttgatgaccagccggaaatttctcaagaatgtggaattagagccatgccaaccttcatggttttcaaagatggcgcgaagctggacgagtttatgggcgctcatcccaatggcctacatgaccttgttcagaagtatgtataa

SEQ ID NO: 7856 - protein, 107 aa, Aspergillus oryzae
MAEVTPLNSLSEFQTLINSGQVVIIDFWAPWCGPCRMISPVFERLASDPQYSSIKFVKVDVDDQPEISQECGIRAMPTFMVFKDGAKLDEFMGAHPNGLHDLVQKYV

SEQ ID NO: 7857 - DNA, 333 bp, Aspergillus oryzae
  CDS (1)..(333)
atgtccattgaattacaacaactaatccccaacctctatagccctgtcatcttcaaggccctcacctcttccggccccgtcgtcgttgacttcttcgctacctggtgcggtccctgcaaggccgtcgcgcccgtcgtcggaaagcttagtgaaacctacgagaacgtacgcttcattcaggtggacgtcgataagaaccgtcaggtcgcacaagatatgaaagtgagggctatgccgacgttcattgtgttcaaggatggcaagccccatggagagccgattgtgggcggaaacatgaaggccctggaggatagaatcaaagaagttgcttag

SEQ ID NO: 7858 - protein, 110 aa, Aspergillus oryzae
MSIELQQLIPNLYSPVIFKALTSSGPVVVDFFATWCGPCKAVAPVVGKLSETYENVRFIQVDVDKNRQVAQDMKVRAMPTFIVFKDGKPHGEPIVGGNMKALEDRIKEVA

SEQ ID NO: 7859 - DNA, 333 bp, Aspergillus oryzae; identical to SEQ ID NO: 1242
  CDS (1)..(333)

SEQ ID NO: 7860 - protein, 110 aa, Aspergillus oryzae; identical to SEQ ID NO: 1243

SEQ ID NO: 7861 - DNA, 975 bp, Aspergillus oryzae
  CDS (1)..(975)
atgtcgagccccgttcatatctcctccaaggagcagttcagcaccctgctgacgaagtctcgctttgttgtcgcggacttctacgcagactggtgcggaccatgcaaagccatcgcccctgcctatgagcagctggcagcccagctgtcacgcccgaaccgaatcaccttcaccaagatcaacgtcgatcaccaacaggaccttgctaaggcctacggagtgacagccatgcccaccttcatcgtgttcgagcgcggccgtccaacctccaccgtcaaaggcgccgacccccagaagctgtcggaggtggtccgcaaactcgcatcggaggccagcaaacccgacgacggcggcgagggctcatcaggcagctccgacgcagattggatcgggctggccgcaccgaaaggctacgccgacatcacggaccagtacgatcccaagggcctggagctgctgaaccgggacagcgagttcggaacggcgaagacactcttcgagacttcgaagccgtcggcgctgaacaacggcaagggaaaggctaaggattgggtcgagagcgataccgatgaacagcttatgctctttgttccgttccagtcgacgctcaaggtgcattcgttgcagattacttcgttgcctcccagtgatggtgatgagcttcccatgcgcccgcagacgatccatctctacacgaaccgctcgcatgtcctgggctttgacgaggcggagggtatcgatcctgtgcagacggtgactatccagcctgaagattgggataagaagaccggaacggccaagattgatttgcggtttgtcaaattccagagggttacgtcgttgatcatgttctttgtggatggggatggggacagtgaaaagctgcgcgtggaccgtatccgtatctttggtgaggcaggcgaaaagagagagatgggcaagctggagaagattggtgatgagcctggtgaataa

SEQ ID NO: 7862 - protein, 324 aa, Aspergillus oryzae
MSSPVHISSKEQFSTLLTKSRFVVADFYADWCGPCKAIAPAYEQLAAQLSRPNRITFTKINVDHQQDLAKAYGVTAMPTFIVFERGRPTSTVKGADPQKLSEVVRKLASEASKPDDGGEGSSGSSDADWIGLAAPKGYADITDQYDPKGLELLNRDSEFGTAKTLFETSKPSALNNGKGKAKDWVESDTDEQLMLFVPFQSTLKVHSLQITSLPPSDGDELPMRPQTIHLYTNRSHVLGFDEAEGIDPVQTVTIQPEDWDKKTGTAKIDLRFVKFQRVTSLIMFFVDGDGDSEKLRVDRIRIFGEAGEKREMGKLEKIGDEPGE

SEQ ID NO: 7863 - DNA, 327 bp, Aspergillus oryzae; identical to SEQ ID NO: 1244
  CDS (1)..(327)

SEQ ID NO: 7864 - protein, 108 aa, Aspergillus oryzae; identical to SEQ ID NO: 1245

SEQ ID NO: 7865 - DNA, 330 bp, Aspergillus oryzae; identical to SEQ ID NO: 1246
  CDS (1)..(330)

SEQ ID NO: 7866 - protein, 109 aa, Aspergillus oryzae; identical to SEQ ID NO: 1247

SEQ ID NO: 7867 - DNA, 318 bp, Brevibacillus choshinensis
  CDS (1)..(318): transl_table=11
atggcaatcgtaaatggtactgaccaaaacttttcccaggaagtagagcaaggcggtacagtcctggttgacttctgggctccatggtgcggcccttgcaaaatgatcgctcccgttttggaacaaatggatagcgaagtgggctccaagctcaaaatcgtgaaagtaaacgtggatgacaacccagattctgctggtcgcttcggcgtaatgtccatccctaccctgatcgttttcaaagacggtcagccagttgacaaagtcatcggcttccaaccaaaagaagctttgatggcaactgttggcaaacacctgtaa

SEQ ID NO: 7868 - protein, 105 aa, Brevibacillus choshinensis
MAIVNGTDQNFSQEVEQGGTVLVDFWAPWCGPCKMIAPVLEQMDSEVGSKLKIVKVNVDDNPDSAGRFGVMSIPTLIVFKDGQPVDKVIGFQPKEALMATVGKHL

SEQ ID NO: 7869 - DNA, 327 bp, Chlamys farreri
  CDS (1)..(327)
atgagcgagactgggaaggtcatcgggttgaaaacaaaggcagattttgatgaatgcttacaaaccgacaaacttgtggtcatcgatttctttgccgattggtgcggaccatgtaaacaaattgcacctgcaattgaggaactggccaaggcaaatactgatgtcatctttaggaaggttaatgtagatgagaatgatgagacagctcaagcatgtgaaatcagtgccatgccaacatttcggttttacaaaagtggacaaacggttgatgaagttgtcggagccaataagggaaaaattgaggaatatattgtcaaaaatgagtga

SEQ ID NO: 7870 - protein, 108 aa, Chlamys farreri
MSETGKVIGLKTKADFDECLQTDKLVVIDFFADWCGPCKQIAPAIEELAKANTDVIFRKVNVDENDETAQACEISAMPTFRFYKSGQTVDEVVGANKGKIEEYIVKNE

SEQ ID NO: 7871 - DNA, 699 bp, Nicotiana alata
  CDS (137)..(595)
ccacgcgtccgggaaaatcgaattcacaataggagctgcgcgtaatataaaagcagtgcttttattaccgtctcagtagtttcttccctattttgactactttgtgcgtaaggagagagagagagtgaagaatccaatgggatcgtatctttcaagtttgctcggtggaggcgcggcggaagcggcagaggcagaatcaggatcgtcgtcagaaccgtcgcgtgtgattgcttttcattcttccaatcggtggcaacttcacttcaattcctccaagcaattaaataaactgatagttgtggattttgcggctacatggtgtgggccctgcaaaatgatggagccggttattaacgccatgtctgccaagtataccgacgttgacttcgtcaaaatcgacgtcgatgagctctcagatgtagcacaagagtttggagtacaagctatgccaacatttttgctgctgaagcaaggaaaggaagtagagagagtggttggggctaagaaagatgagctcgagaaaaagattctcaagcacagggaagctcctaaatttgctgctagtaattatcgaactaaatttcatgtccaataaattaacagaaaagaaaagcatcatttttactttactaccggattgggatgaaccgaatattgttgaattgctttgggggaataaaaaaaaaaaaaaaaaaaaaa

SEQ ID NO: 7872 - protein, 152 aa, Nicotiana alata; identical to SEQ ID NO: 1255

SEQ ID NO: 7873 - DNA, 556 bp, Zea mays
  CDS (1)..(369)
atggcgtccgagcagggagtcgtgatcgcgtgccacagcaaggctgagtttgacgcccacatgaccaaggcccaggaagccggcaagctggtggtcatcgacttcactgccgcctggtgcggtccatgccgcgccatcgccccactgttcgtcgaacacgccaagaagttcactcaggtcgtgttcctgaaggtggacgtggacgaagtgaaggaagtcaccgcggcctacgaggtcgaggcgatgccgaccttccacttcgtcaagaacggcaagacggtcgcgaccatcgtgggtgccaagaaggacgagctcctggccctgatcgagaagcatgccgcgcctgcgcctgcgtctgcgtctgcctaaaggagatcagatcagtcgtcgccgtcaataagggccagcacgtatggctgtagatgttgtcgttatcagttctggctttgtcgtttgtgggcgattgtgaactagtagtatgtttgtttctatccgattcggaggcgatacttaaccatggatacttgttgtgcgttcaaaaaaaaaaaaaaaaaaa

SEQ ID NO: 7874 - protein, 122 aa, Zea mays; identical to SEQ ID NO: 1257

SEQ ID NO: 7875 - DNA, 948 bp, Cryptococcus neoformans
  CDS (1)..(948)
atggctggtggtattcaaaacattacatccgcagcagagtttgacggtatcgtccgttcattacccccctcacgtttgctcgtcgcagacttctatgcccaatggtgtggaccttgccacgccatcgcgcctgtattagagcaactggctggcgcttataagcatgttacgtttgttgaatcccggcagaaaattgacgtagatcaacaaagagagcttgcctcaaggttcaggataactgctatgcccactttcaaactcttgaaaggcggtagagaggttgaccagctgcgaggcgcctcccctcctcagctcagccaattggtctctcggcacgcggggactgcgcccccgcccacagcgaccgctagctccggctccaaatcgcaagtagctacaggtgaaataacggaatctctcctcaagcaggtcatatcaaagggactcaactgtctcaatgaagccaaagaacatccactatcttctatcctcggacctgaaaagggtcctcgaggcaactcctaccttgaatcggatgttgatcctgagctccttatatctataccttttcaagatgccgttaagctgaaagccatctcaatcttttccggtatcagcccttctcaagcacccaaaacagtgaagctgtttattaaccagcccaacatcggcttcgatgatgcggaaaacgaggcgcctgcccaagaattgattttgaccccagagcaagtcaaaggagacagaattccattgcgatacgtgaggtttcagaacgtgagaagcttgcatatcttggtaaaggacaatcaggaggacgaggagaccaccagaattgactcaattgacgtgtatggtgctcagggtgaaaaactcgacgccggtgtcacttcacagtcttctgctggtaccggcagtatgctcgagaagctcttagcttcgggtaaataa

SEQ ID NO: 7876 - protein, 315 aa, Cryptococcus neoformans
MAGGIQNITSAAEFDGIVRSLPPSRLLVADFYAQWCGPCHAIAPVLEQLAGAYKHVTFVESRQKIDVDQQRELASRFRITAMPTFKLLKGGREVDQLRGASPPQLSQLVSRHAGTAPPPTATASSGSKSQVATGEITESLLKQVISKGLNCLNEAKEHPLSSILGPEKGPRGNSYLESDVDPELLISIPFQDAVKLKAISIFSGISPSQAPKTVKLFINQPNIGFDDAENEAPAQELILTPEQVKGDRIPLRYVRFQNVRSLHILVKDNQEDEETTRIDSIDVYGAQGEKLDAGVTSQSSAGTGSMLEKLLASGK

SEQ ID NO: 7877 - DNA, 324 bp, Ixodes scapularis
  CDS (1)..(324)
  misc_feature (69)..(69): y is t or c
atggtccttcaaatcgtcgagagcaaggaggacttcgaaaagaagctggaagaggccggcgacaagctygtggtggtggacttctttgccacgtggtgcggcccttgcaagatggtggagcccttcctgaagcaacagtccgaaattctcaaggatgttgtcatcttcctcaaggttgatgtggacgagaatgaagagattacgcaggagtacgagattgcgtgcatgccaaccttcctcttcatcaagaacaaaaccaagttggacgaaatctccggagccaacgaagagtccatcaaggaaatgttggacaagcacaagtaa

SEQ ID NO: 7878 - protein, 107 aa, Ixodes scapularis
MVLQIVESKEDFEKKLEEAGDKLVVVDFFATWCGPCKMVEPFLKQQSEILKDVVIFLKVDVDENEEITQEYEIACMPTFLFIKNKTKLDEISGANEESIKEMLDKHK

SEQ ID NO: 7879 - DNA, 703 bp, Plantago major
  CDS (106)..(534)
cggcacgaggcaaaaacattttctgcgttgattctaggcagactcacaatcaaccaatcaatcaatcaatcttctctcttccaaatctctcaaaatccaaaccgaatgggctcgtttctctcttccgtgatcggaatcggaccggccgatgcggcggagacacctgccggagactcatcggagccttcgcgcgtcatggcgttccactcgtcgcaacgctggcagctccacttcaactcctccaagcagttaaacaaactgatggttgtggatttcacggcgacttggtgtggaccttgcaagttcatggcgcctgttttcgctgaactttctaccaagtacagtgatgttgattttgtcaaaatcgacgtcgatgagctcgctgatgtggcgcgggagtttggtgtgcaggcgatgccaacattcatgttactaaagcaaggaaaacaagttggtaccgttgtgggagctaagaaagatgaactggagaagaagatcctcgaacacagggaagcccctagatttgctgcatagttttattctttgacccactcaattggatgaatgactgtaaactgcgttttcttttcaccagtgcaaattgtgtgttgtccatagtgatgaattaatggttctctccatgtaactttataattcatcaataaatacattgtgtcttgaagcttaaaaaaaaaaaaaaaaa

SEQ ID NO: 7880 - protein, 142 aa, Plantago major; identical to SEQ ID NO: 1261

SEQ ID NO: 7881 - DNA, 408 bp, Glycine max; identical to SEQ ID NO: 1262
  CDS (1)..(408)

SEQ ID NO: 7882 - protein, 135 aa, Glycine max; identical to SEQ ID NO: 1263

SEQ ID NO: 7883 - DNA, 333 bp, Paxillus involutus
  CDS (1)..(333)
atgcccgctgaagatatcaagtccaaggctcatttcgacgagctcatcaacagcgggaagaccatctttatcgacttccatgctacctggtgtggaccatgcaaggtcatttcgccactcttccaaaagctttccaacgagcaccagggagacaatgttgcattctacaaggtcgatatcgacgatcaggctgagatcgcccaggaagtcgccatcacagcgatgcccacgttcaaggtgtacaaggatggagcgctcgtcggcaacttaatcggcgcgaaccaatctcggttgaccgagctggtcggggagcatgccccaaagacagtgtaa

SEQ ID NO: 7884 - protein, 110 aa, Paxillus involutus
MPAEDIKSKAHFDELINSGKTIFIDFHATWCGPCKVISPLFQKLSNEHQGDNVAFYKVDIDDQAEIAQEVAITAMPTFKVYKDGALVGNLIGANQSRLTELVGEHAPKTV

SEQ ID NO: 7885 - DNA, 628 bp, Capsicum annuum
  CDS (64)..(438)
ggcacgggatttgtttggtgttttctgttttttgaatttcgaattttccgaaaatctgtgagaatggctgctacttcatctgaagaaggacaagtttttggttgccacaacgttgaggagtgggatcagcacttcaagaagggtgtcgagactaagaaattggtggtggtggattttaccgcatcctggtgcggtccttgccgttttattgccccaattcttgctgacattgctaagaagatgccccatgtcatattcctcaaggttgatgttgatgaactaaagactgttgcagaggaatggaatgtggatgctatgccaacatttgtcttctttaaagatggcgaagaagtggatagggttgttggtgcccagaaagaggagttgcaggcggccatacttaagcatgttggtgctcctgctactgtgacagcttgagccataatcaaggatatgatattctggtgtttagtattgtccttttgtaataagtctggatggctgtgtgttttattatccactatctctctcttgtttttgtgaacccttttggtgcttgaattctgatatttgtgcagatggccttactggtgtaaggttatatgctcatttctatgaaaaaaaaaaa

SEQ ID NO: 7886 - protein, 124 aa, Capsicum annuum; identical to SEQ ID NO: 1265

SEQ ID NO: 7887 - DNA, 351 bp, Paracoccidioides brasiliensis; identical to SEQ ID NO: 1266
  CDS (1)..(351)

SEQ ID NO: 7888 - protein, 116 aa, Paracoccidioides brasiliensis; identical to SEQ ID NO: 1267

SEQ ID NO: 7889 - DNA, 372 bp, Ipomoea batatas; identical to SEQ ID NO: 1268
  CDS (1)..(372)

SEQ ID NO: 7890 - protein, 123 aa, Ipomoea batatas; identical to SEQ ID NO: 1269

SEQ ID NO: 7891 - DNA, 369 bp, Hordeum vulgare var; identical to SEQ ID NO: 1274
  CDS (1)..(369)

SEQ ID NO: 7892 - protein, 122 aa, Hordeum vulgare var; identical to SEQ ID NO: 1275

SEQ ID NO: 7893 - DNA, 372 bp, Citrus paradisi; identical to SEQ ID NO: 1278
  CDS (1)..(372)

SEQ ID NO: 7894 - protein, 123 aa, Citrus paradisi; identical to SEQ ID NO: 1279

SEQ ID NO: 7895 - DNA, 330 bp, Chlamydomonas reinhardtii
  CDS (1)..(330)
atgggcggtcggattatccaggtgaagagcgcggaggagtggacaagccatatgcgggaatgccgcgcattcggaggcaaatcctatctcgtggacttcacggcatcgtggtgcggaccctgccaaaaaatcgccccgctctatgagaagtacagcgccgagaacccaaacatcacattcctcaaggtggacgtcgacgaactggcggacgtggcgggcgagtgcgacgtcaaggccatgcccactttcatcggctacttcaacggcgagcaggtggacacagtggtgggcgccgacgacgccaagctgcgtgagctcatcgccacgtga

SEQ ID NO: 7896 - protein, 109 aa, Chlamydomonas reinhardtii
MGGRIIQVKSAEEWTSHMRECRAFGGKSYLVDFTASWCGPCQKIAPLYEKYSAENPNITFLKVDVDELADVAGECDVKAMPTFIGYFNGEQVDTVVGADDAKLRELIAT

SEQ ID NO: 7897 - DNA, 565 bp, Pisum sativum
  CDS (36)..(428)
gtagttatcaagcaagcaagtcaacgaacctatcaatgggctcaattctctcttccctcatcggcggcgaaccagctgccgccttagaatcctccgatcacgccgtcaaaacattccactcatccgcacgctggcagctccacttcaacgaaatcaaagactcgcctcgtctcgttgtgattgatttctctgctacgtggtgtggaccgtgtaaaatgatggaaccgattgtttatgccatggctaacgaattcacggacgttgaattcatcaagatcgacgttgacgaattatcggatgtggcgcaggagtttaaggtgcaggctatgccgacgtttttgttgttgaagaatggggaagaggtggataagattgttggtgccaaaaaagatgaactcaaaaacaagattaaaaaatacagagcttagtacttattttattttcaacaataaagagaaaattgaacatgatgttattatgatggtacaattgtaaaattttaactggttgaatgatgtttatgtatttgtttgaaaaaaaaaaaaaaaaaaaaaaaaaaaaaaaa

SEQ ID NO: 7898 - protein, 130 aa, Pisum sativum; identical to SEQ ID NO: 1283

SEQ ID NO: 7899 - DNA, 342 bp, Pisum sativum; identical to SEQ ID NO: 1284
  CDS (1)..(342)

SEQ ID NO: 7900 - protein, 113 aa, Pisum sativum; identical to SEQ ID NO: 1285

SEQ ID NO: 7901 - DNA, 360 bp, Arabidopsis thaliana; identical to SEQ ID NO: 1302
  CDS (1)..(360)

SEQ ID NO: 7902 - protein, 119 aa, Arabidopsis thaliana; identical to SEQ ID NO: 1303

SEQ ID NO: 7903 - DNA, 345 bp, Populus tremula x Populus tremuloides
  CDS (1)..(345)
atggccgaagaaggacaagttattgcctgccacacagtggatacctggaaagagcatttcgagaagggaaaagggtctcagaaactgattgtcgtggattttactgcttcatggtgtccaccatgtaaaatgattgctccaatcttcgccgagttggcgaagaagtttcccaatgtcacattcttgaaggtggatgtggatgaattgaaggctgttgctgaggagtggaatgtggaggcaatgccaacttttattttcctgaaagatggaaaattagtggacaaaactgtgggtgctgataaagatggcctgccaacactggttgcaaagcacgcaactgcataa

SEQ ID NO: 7904 - protein, 114 aa, Populus tremula x Populus tremuloides
MAEEGQVIACHTVDTWKEHFEKGKGSQKLIVVDFTASWCPPCKMIAPIFAELAKKFPNVTFLKVDVDELKAVAEEWNVEAMPTFIFLKDGKLVDKTVGADKDGLPTLVAKHATA

SEQ ID NO: 7905 - DNA, 381 bp, Podospora anserina
  CDS (1)..(381)
atgacggtccacatcttcgaaacagccggccagttcaaggaggccgtcgccgcccaccccgtcgtcgtcgtcgacgccttcgctacctggtgtggcccgtgcaaggccatcgcgccccagatcgcaaagtgggccgaggaccccgagttcaaggacaagatctacttttgcaagttcgacgtcgaccacctccccgaactcgctcaggagctcggcatccgcgccatgcccaccttcatcttctacaaggacggcgaccgcgtcgacgagctcatgggcgccaacccccccgcgctactgaacctgcttaggaagtacctcggtgggagcggtgctggtgctagcagtggtggggagcaccctgagcctccttcgctttaa

SEQ ID NO: 7906 - protein, 126 aa, Podospora anserina
MTVHIFETAGQFKEAVAAHPVVVVDAFATWCGPCKAIAPQIAKWAEDPEFKDKIYFCKFDVDHLPELAQELGIRAMPTFIFYKDGDRVDELMGANPPALLNLLRKYLGGSGAGASSGGEHPEPPSL

SEQ ID NO: 7907 - DNA, 411 bp, Prunus persica; identical to SEQ ID NO: 1306
  CDS (1)..(411)

SEQ ID NO: 7908 - protein, 136 aa, Prunus persica; identical to SEQ ID NO: 1307

SEQ ID NO: 7909 - DNA, 357 bp, Pisum sativum; identical to SEQ ID NO: 1308
  CDS (1)..(357)

SEQ ID NO: 7910 - protein, 118 aa, Pisum sativum; identical to SEQ ID NO: 1309

SEQ ID NO: 7911 - DNA, 315 bp, Branchiostoma belcheri
  CDS (1)..(315)
atggtgcaaatgattgaaaccaaggctgcctttgataaactcctggctgagaccgacaagctgatagttgtggacttcacagcctcctggtgtgggccctgcaggatgatcgctcctgtgtttgagaaactggctgaagaaaaccctgatgtcgtctttgtgaaggtggacgttgatgcaaatgacgagacagctggcgcctgtggcatctctgccatgcctacattccactgctacaggaatggagcaaaggttgaggagctgtgtggcgcaagtgaagagaagttgagggaaatggtggccaagaacaagtaa

SEQ ID NO: 7912 - protein, 104 aa, Branchiostoma belcheri
MVQMIETKAAFDKLLAETDKLIVVDFTASWCGPCRMIAPVFEKLAEENPDVVFVKVDVDANDETAGACGISAMPTFHCYRNGAKVEELCGASEEKLREMVAKNK

SEQ ID NO: 7913 - DNA, 321 bp, Aedes aegypti
  CDS (1)..(321)
atggtgtacattgttaaggatgctgctgacttcgacagcaagctggaatctgccggcgacaagctcgtcgtggtggactttttcgccacctggtgcggcccctgcaaggtgattgcccccaagctggaggaattccagaacaagtacgccgagaaggtgctcatcatcaaggtcgacgtggacgagtgcgaagatctggccgccaagtacgaaatctccagtatgcccaccttcctgttcatcaagggcaagaaagtcgtgtaccagttctccggtgccaacgaccagaagctggagatgtacatcttgaagcacgcctag

SEQ ID NO: 7914 - protein, 106 aa, Aedes aegypti
MVYIVKDAADFDSKLESAGDKLVVVDFFATWCGPCKVIAPKLEEFQNKYAEKVLIIKVDVDECEDLAAKYEISSMPTFLFIKGKKVVYQFSGANDQKLEMYILKHA

SEQ ID NO: 7915 - DNA, 324 bp, Neurospora crassa; identical to SEQ ID NO: 1312
  CDS (1)..(324)

SEQ ID NO: 7916 - protein, 107 aa, Neurospora crassa; identical to SEQ ID NO: 1313

SEQ ID NO: 7917 - DNA, 396 bp, Phalaris coerulescens; identical to SEQ ID NO: 1318
  CDS (1)..(396)

SEQ ID NO: 7918 - protein, 131 aa, Phalaris coerulescens; identical to SEQ ID NO: 1319

SEQ ID NO: 7919 - DNA, 396 bp, Lolium perenne; identical to SEQ ID NO: 1320
  CDS (1)..(396)

SEQ ID NO: 7920 - protein, 131 aa, Lolium perenne; identical to SEQ ID NO: 1321

SEQ ID NO: 7921 - DNA, 396 bp, Hordeum bulbosum; identical to SEQ ID NO: 1324
  CDS (1)..(396)

SEQ ID NO: 7922 - protein, 131 aa, Hordeum bulbosum; identical to SEQ ID NO: 1325

SEQ ID NO: 7923 - DNA, 321 bp, Manduca sexta
  CDS (1)..(321)
atgtcgatccacatcaaggacgctgacgacctcaagaacaggctcgccgaggccggcgataagctggtggtgatcgacttcatggcgacctggtgcggtccctgcaagatgatcggccccaaactagacgagatggccgctgagatggcggactctatcgtcgtagttaaggtcgacgtggatgagtgcgaggacatcgcagccgactacaacatcaactctatgcccacattcgtgttcgtcaagaactccaagaagctcgaagagttctccggcgcgaacgtggacaagctaaagaacaccatcctcaagctgaagtaa

SEQ ID NO: 7924 - protein, 106 aa, Manduca sexta
MSIHIKDADDLKNRLAEAGDKLVVIDFMATWCGPCKMIGPKLDEMAAEMADSIVVVKVDVDECEDIAADYNINSMPTFVFVKNSKKLEEFSGANVDKLKNTILKLK

SEQ ID NO: 7925 - DNA, 324 bp, Drosophila melanogaster
  CDS (1)..(324)
atggcatccgtacgcaccatgaacgactatcacaagcgcatcgaggcggccgacgacaagctaatcgtgctggatttctatgcgacatggtgtggtccctgcaaggaaatggagagcaccgtcaaatcgctggccagaaaatactccagcaaggcggtggtgctcaagatcgatgtggacaaattcgaggagctgacggagcgctacaaggtgcgcagcatgccaacgtttgtctttttgcgccaaaatcgacgcctggcctcctttgccggcgccgacgagcacaagctgaccaacatgatggccaagctggtgaaggcgtaa

SEQ ID NO: 7926 - protein, 107 aa, Drosophila melanogaster
MASVRTMNDYHKRIEAADDKLIVLDFYATWCGPCKEMESTVKSLARKYSSKAVVLKIDVDKFEELTERYKVRSMPTFVFLRQNRRLASFAGADEHKLTNMMAKLVKA

SEQ ID NO: 7927 - DNA, 345 bp, Drosophila melanogaster; identical to SEQ ID NO: 1328
  CDS (1)..(345)

SEQ ID NO: 7928 - protein, 114 aa, Drosophila melanogaster; identical to SEQ ID NO: 1329

SEQ ID NO: 7929 - DNA, 509 bp, Chlamydia pneumoniae
  CDS (101)..(409): transl_table=11
gattcaggttctagtgagcttatgctcatggaagttcaagtcttcttagctgcaagaaaataacagggacagtaattcgatttttcgagaagggaaacttatggtaaagatcatatcaagtgaaaattttgactcttttattgcatcggggctcgttctcgttgatttctttgcagaatggtgtggcccctgtcggatgctcactcctatcttagaaaatcttgctgcggaacttcctcatgtcactattggaaaaatcaatatagatgagaacagcaagcctgcagaaacgtacgaagtcagctctattcctacgcttattctttttaaggatgggaacgaggtggctcgggtcgtaggtcttaaggataaagaattcctaaccaatcttatcaataagcacgcttaaaaagacgctgcaatattaaaccgtaggattcttttgcaatgctacggttttctgccttaccacttcatataaaacgatccctacactggtagctaaattt

SEQ ID NO: 7930 - protein, 102 aa, Chlamydia pneumoniae
MVKIISSENFDSFIASGLVLVDFFAEWCGPCRMLTPILENLAAELPHVTIGKINIDENSKPAETYEVSSIPTLILFKDGNEVARVVGLKDKEFLTNLINKHA

SEQ ID NO: 7931 - DNA, 700 bp, Fusarium culmorum
  CDS (55)..(420)
atcaaaaaagccacatctaaaatcagatcaataccacccaacacattacgcaaaatggttcaccacattacttcaaacgacgagctacagaagctcctctcatcaacaacatacgtcgtcgttgacttcttcgcagactggtgtcctccctgcaaggccatcgcccccgtctacgagcaactctccaccaagcacagcgtccccgacgttttggcctttgccaaagtcaacgtggaccatgtccaggacgccgcacaacaatatggtatcactgccatgcccacctttatgttcttcaaggaaggaaagcaggttgccgtcaacggccaggccgtgatcaagggtgctgatcccagaacgctgggagcggcagctgagaagctgggcggtctagcacaaaagcgagttgctggcgcttaaggaaatgagaggtttaaaagtacggccgggaatagaaaggacaaaaagaaagagagttcggagaatttactccagggttcattgcgacatttgtcatggcacctaaattagaggcattttgtgtgcctgcatttgggagttaaggttagagttttcgacaggaatggggttgcacgtggaggaaatgaaggatcaacggtactggcttagatgaccgggatcgagaacaagctacgggatataagacatgactgtttgcggaaaaaaaaaaaaaaaaaaa

SEQ ID NO: 7932 - protein, 121 aa, Fusarium culmorum
MVHHITSNDELQKLLSSTTYVVVDFFADWCPPCKAIAPVYEQLSTKHSVPDVLAFAKVNVDHVQDAAQQYGITAMPTFMFFKEGKQVAVNGQAVIKGADPRTLGAAAEKLGGLAQKRVAGA

SEQ ID NO: 7933 - DNA, 321 bp, Helicobacter pylori J99
  CDS (1)..(321): transl_table=11
atgagtcactatattgaattaactgaagaaaattttgaaagcaccattaaaaaaggggttgcgttagtggatttttgggcaccatggtgtggtccttgtaagatgctatcccctgtgattgatgaattagctagcgaatatgaaggtaaggctaagatttgtaaagttaataccgatgagcaagaagaattgagcgcgaaatttggtattaggagcattcctacgcttttattcacaaaagatggcgaagttgtccatcagttggtgggcgtgcaaactaaagtcgctttaaaagagcaattgaacaagcttttaggctag

SEQ ID NO: 7934 - protein, 106 aa, Helicobacter pylori J99
MSHYIELTEENFESTIKKGVALVDFWAPWCGPCKMLSPVIDELASEYEGKAKICKVNTDEQEELSAKFGIRSIPTLLFTKDGEVVHQLVGVQTKVALKEQLNKLLG

SEQ ID NO: 7935 - DNA, 351 bp, Mycobacterium bovis
  CDS (1)..(351): transl_table=11
atgaccgattccgagaagtccgccaccatcaaagttaccgacgcatcctttgccaccgacgtgctatccagcaacaagcctgtgctggttgacttttgggcgacatggtgtggaccttgcaagatggtagcgcccgttctcgaggaaatcgccaccgagcgcgcaacagacctcaccgtcgccaagctcgacgtggacaccaacccggagaccgcccgcaacttccaggtcgtctcgatccctaccctgatcttgttcaaggacggccagccggtgaaacgaatcgttggcgccaagggtaaggctgcgttgctgcgcgagctctcagacgtggttcccaacctcaactag

SEQ ID NO: 7936 - protein, 116 aa, Mycobacterium bovis
MTDSEKSATIKVTDASFATDVLSSNKPVLVDFWATWCGPCKMVAPVLEEIATERATDLTVAKLDVDTNPETARNFQVVSIPTLILFKDGQPVKRIVGAKGKAALLRELSDVVPNLN

SEQ ID NO: 7937 - DNA, 384 bp, Neurospora crassa
  CDS (1)..(384)
atgtcggacggcgtcaagcacatcaactcggcccaggagtttgcgaacctcctcaacacaacccagtacgtcgtcgctgacttctacgccgactggtgcgggccttgcaaggccattgcgcccatgtatgcccagtttgcgaagaccttctccatccccaacttcctcgcctttgccaagatcaacgtcgatagcgtccagcaggttgctcagcactaccgtgtctccgccatgcccaccttcctcttcttcaagaacggcaagcaggtcgccgtcaacggttccgtcatgatccagggcgccgatgtcaacagtctgcgggccgctgccgagaagatgggccgtctggcaaaggagaaggccgctgccgctggctcgtcgtga

SEQ ID NO: 7938 - protein, 127 aa, Neurospora crassa
MSDGVKHINSAQEFANLLNTTQYVVADFYADWCGPCKAIAPMYAQFAKTFSIPNFLAFAKINVDSVQQVAQHYRVSAMPTFLFFKNGKQVAVNGSVMIQGADVNSLRAAAEKMGRLAKEKAAAAGSS

SEQ ID NO: 7939 - DNA, 327 bp, Pseudomonas aeruginosa
  CDS (1)..(327): transl_table=11
atgagcgaacatatcgtcaacgttactgatgccagcttcgagcaggacgtgctgaaggccgacggccctgtgctggtggactactgggccgagtggtgcggtccgtgcaagatgatcgcgccggtgctggacgaagtcgccagggactatcagggcaagctgaaggtctgcaagctgaacatcgacgagaaccaggataccccgccgaaatacggcgtgcgtggcatccctaccctgatgctgttcaaggacggcaatgtcgaggcgaccaaggtcggcgcactgtccaagtcgcagctggcggccttcctcgacgccaatatctga

SEQ ID NO: 7940 - protein, 108 aa, Pseudomonas aeruginosa
MSEHIVNVTDASFEQDVLKADGPVLVDYWAEWCGPCKMIAPVLDEVARDYQGKLKVCKLNIDENQDTPPKYGVRGIPTLMLFKDGNVEATKVGALSKSQLAAFLDANI

SEQ ID NO: 7941 - DNA, 464 bp, Rhodobacter sphaeroides
  CDS (57)..(377): transl_table=11
ccggcagggggccatccttactttccaagcaagcctacggatcaggagaattgaatatgtccaccgttcccgtgacggacgccaccttcgacaccgaggtgcgcaagtccgacgtgcccgtcgtcgtcgatttctgggccgaatggtgcggcccctgccggcagatcggcccggcgctcgaggagctctcgaaggaatatgccggcaaggtgaagatcgtgaaggtcaatgtcgacgagaaccccgagagcccggcgatgctgggcgttcgcggcatcccggcgctgttcctgttcaagaacggtcaggtcgtgtcgaacaaggtcggcgctgcgccgaaggccgcgctggccacctggatcgcttcggcgctctgagatcctctgccatagcagagaccggacggggcgccttcgggcgcccttttccttgagcaagcgaccgaccgcgacgggcgaggatcc

SEQ ID NO: 7942 - protein, 106 aa, Rhodobacter sphaeroides
MSTVPVTDATFDTEVRKSDVPVVVDFWAEWCGPCRQIGPALEELSKEYAGKVKIVKVNVDENPESPAMLGVRGIPALFLFKNGQVVSNKVGAAPKAALATWIASAL

SEQ ID NO: 7943 - DNA, 312 bp, Schizosaccharomyces pombe
  CDS (1)..(312)
atggtgaaacaagtctccgactcttctgaatttaaatctattgtttgccaagacaagcttgtcgttgtcgacttctttgctacttggtgtggaccttgcaaggccattgctcctaagtttgagcaattttccaacacttactctgatgccactttcatcaaggttgatgtcgatcaattaagtgaaattgcagctgaagctggcgttcacgctatgccctctttcttcctttacaagaatggtgagaagattgaagaaatcgtaggtgctaatcctgctaaattagaggcttctattaaggcgaacctctaa

SEQ ID NO: 7944 - protein, 103 aa, Schizosaccharomyces pombe
MVKQVSDSSEFKSIVCQDKLVVVDFFATWCGPCKAIAPKFEQFSNTYSDATFIKVDVDQLSEIAAEAGVHAMPSFFLYKNGEKIEEIVGANPAKLEASIKANL

SEQ ID NO: 7945 - DNA, 315 bp, Staphylococcus epidermidis
  CDS (1)..(315): transl_table=11
atggcaatcgtaaaagtaactgattctgattttgatagcaaaattgaatctggtgttaaattagttgatttctgggcgacttggtgtggaccttgtaaaatgattgcaccagttttagaagaactagcaggagactatgatggtaaagctgacatcttaaaattagatgttgacgaaaacccatcaactgcagcgaaatatgaagtaatgagtatcccaactttaattgtatttaaagatggcgaaccagttgataaagttgtaggtttccaacctaaagaaaacttggcagaagtattagataaacatctataa

SEQ ID NO: 7946 - protein, 104 aa, Staphylococcus epidermidis
MAIVKVTDSDFDSKIESGVKLVDFWATWCGPCKMIAPVLEELAGDYDGKADILKLDVDENPSTAAKYEVMSIPTLIVFKDGEPVDKVVGFQPKENLAEVLDKHL

SEQ ID NO: 7947 - DNA, 384 bp, Saccharomyces cerevisiae
  CDS (1)..(384)
atgttgttctataagcctgtgatgaggatggcggtgagaccgctaaaaagcataagattccagtcctcatacaccagtattactaaattgacgaacctaacagaatttaggaatttgatcaagcaaaatgataaactagtcatcgatttttatgctacttggtgtggcccctgtaagatgatgcaaccacacttaacgaaattaattcaggcttatccagatgtaagatttgtcaagtgcgacgtggacgaatcaccagatattgccaaagagtgtgaagtgacggctatgcccacctttgttcttggcaaggatggccaactcatcggcaagatcattggagctaaccctactgctttagagaagggaatcaaagatctataa

SEQ ID NO: 7948 - protein, 127 aa, Saccharomyces cerevisiae
MLFYKPVMRMAVRPLKSIRFQSSYTSITKLTNLTEFRNLIKQNDKLVIDFYATWCGPCKMMQPHLTKLIQAYPDVRFVKCDVDESPDIAKECEVTAMPTFVLGKDGQLIGKIIGANPTALEKGIKDL

SEQ ID NO: 7949 - DNA, 580 bp, Brassica napus
  CDS (14)..(373)
cagattagaagaaatggctgcagaagagggacaagtgatcggttgccacgagattgatgtatgggccgtgcagctcgacacagccaaacaatccaacaagctgattgtgatagatttcactgcttcatggtgcccaccatgccgcatgattgctccagttttcgcagatctggccaagaagttcatgtcaagtgccatcttcttcaaggtggacgtcgatgaactgcagaatgtagctcaagagtttggtgtggaggcaatgccgacctttgttctcatcaaagacggaaatgttgttgataaggtcgttggtgcaaggaaggaagatcttcatgccacaatagccaagcatactggtgttgctactgcttaaagttggttatgagacaataataagctccagttagttttattttaagtttcgctaatagtaatggggatactgtagatgtagaagaataatgtagtggtcaagtgatctctgactcttttgagtctgcaagactgcaacaatattataatacatcataagaccattgcctttaaaaaaaaaaaaaaaaaaaaaaaaaaaaaaaaaaaa

SEQ ID NO: 7950 - protein, 119 aa, Brassica napus; identical to SEQ ID NO: 1351

SEQ ID NO: 7951 - DNA, 357 bp, Nicotiana tabacum; identical to SEQ ID NO: 1352
  CDS (1)..(357)

SEQ ID NO: 7952 - protein, 118 aa, Nicotiana tabacum; identical to SEQ ID NO: 1353

SEQ ID NO: 7953 - DNA, 360 bp, Arabidopsis thaliana; identical to SEQ ID NO: 1356
  CDS (1)..(360)

SEQ ID NO: 7954 - protein, 119 aa, Arabidopsis thaliana; identical to SEQ ID NO: 1357

SEQ ID NO: 7955 - DNA, 351 bp, Fagopyrum esculentum; identical to SEQ ID NO: 1364
  CDS (1)..(351)

SEQ ID NO: 7956 - protein, 116 aa, Fagopyrum esculentum; identical to SEQ ID NO: 1365

SEQ ID NO: 7957 - DNA, 378 bp, Picea mariana
  CDS (1)..(378)
atggcggagggaaacgtgtttgcatgtcactctacagagggctggcgctccaagctgcaggaggccatcgatactaaacgtctggtggcagtagatttcactgcaacgtggtgtggaccttgtcgagtcataggtccagtgtttgttgagctgtcaaagaagttcccagaaatatttttcttgaaggtcgatgtggacgaattgagggatgtcgctcaagagtgggatgtggaggccatgcctacatttatctttatcaaggatggaaaggctgttgataaggttgtgggtgcaaagaaagatgatcttgaaagaaaagttgcagccctagcagctgctgctactactacagaagcaacccttcctgcacaagcttag

SEQ ID NO: 7958 - protein, 125 aa, Picea mariana
MAEGNVFACHSTEGWRSKLQEAIDTKRLVAVDFTATWCGPCRVIGPVFVELSKKFPEIFFLKVDVDELRDVAQEWDVEAMPTFIFIKDGKAVDKVVGAKKDDLERKVAALAAAATTTEATLPAQA

SEQ ID NO: 7959 - DNA, 384 bp, Triticum aestivum; identical to SEQ ID NO: 1370
  CDS (1)..(384)

SEQ ID NO: 7960 - protein, 127 aa, Triticum aestivum; identical to SEQ ID NO: 1371

SEQ ID NO: 7961 - DNA, 357 bp, Arabidopsis thaliana; identical to SEQ ID NO: 1372
  CDS (1)..(357)

SEQ ID NO: 7962 - protein, 118 aa, Arabidopsis thaliana; identical to SEQ ID NO: 1373

SEQ ID NO: 7963 - DNA, 396 bp, Oryza sativa; identical to SEQ ID NO: 1374
  CDS (1)..(396)

SEQ ID NO: 7964 - protein, 131 aa, Oryza sativa; identical to SEQ ID NO: 1375

SEQ ID NO: 7965 - DNA, 564 bp, Oryza sativa
  CDS (1)..(564)
atggcgctacgcctctccgtctcctcctcgcacgggccggcttcctcgccggccatctccacatgccgccccgccgcctgcgggcgcttccccgccttgctcggcggcggtgtggcttctcagaggaggagcctgacggtggtgtctggccctgagacaagggcggtgatccccgtgaggtcgagcggctcggacaccgccactgttggggccgaggcggaggcggtggccgtgaccgggcaggtgacggaggtgaacaaggataccttctggccaattgtcaagtcggcagggcccaaggtcgtcgtcctcgacatgtacacccaatggtgcggcccttgcaaggtgatggcaccgaaattccaggagatgtccgagaaggaccaggacgttgtgttcctcaaactcgactgcaatcaagacaacaagtctcttgcaaaggagctgggcataaaggttgtgccaacattcaagattctcaaggacgggaaggtcgtcaaggaggtcacaggtgccaaactagatgaattaatccaagcgatcgagacggtgaagtcaagctga

SEQ ID NO: 7966 - protein, 187 aa, Oryza sativa
MALRLSVSSSHGPASSPAISTCRPAACGRFPALLGGGVASQRRSLTVVSGPETRAVIPVRSSGSDTATVGAEAEAVAVTGQVTEVNKDTFWPIVKSAGPKVVVLDMYTQWCGPCKVMAPKFQEMSEKDQDVVFLKLDCNQDNKSLAKELGIKVVPTFKILKDGKVVKEVTGAKLDELIQAIETVKSS

SEQ ID NO: 7967 - DNA, 522 bp, Oryza sativa
  CDS (1)..(522)
atggcctcctccgccctcgccgtctccgtcgccaagccagccgcgtctcctcccgtcgccgtcgccgcggtaaccccgcagcgtcgcctcctcccgcagtgccggggcgtccgcgctgccccggtcgtccggctccgctcgggacgcgcccgcggcgtgtcggtggtgtgcgccgcccagggccaggagacctccttccaagttcctgacgtgactaagtcaacatggcagtcacttgtggtggagagtgaacttccggttctcgttgagttctgggcttcgtggtgcgggccatgcaaaatgatagatcctgtcattggcaaactttcaaaagaatatgaagggaagctgaactgctacaagctcaacactgatgaaaaccccgacatagcaacccagtttgggataagaagcattcccacaatgatgatattcaagaacggtgagaagaaagatgcggtgattggagctgtgcccgagagcaccctggtcagcagcatcgacaaatacatcgggaggtaa

SEQ ID NO: 7968 - protein, 173 aa, Oryza sativa
MASSALAVSVAKPAASPPVAVAAVTPQRRLLPQCRGVRAAPVVRLRSGRARGVSVVCAAQGQETSFQVPDVTKSTWQSLVVESELPVLVEFWASWCGPCKMIDPVIGKLSKEYEGKLNCYKLNTDENPDIATQFGIRSIPTMMIFKNGEKKDAVIGAVPESTLVSSIDKYIGR

SEQ ID NO: 7969 - DNA, 543 bp, Oryza sativa
  CDS (1)..(543)
atggcctccgccctcgccgcctccaccgccgtctgctcctctcccctcgcatccgcctccgcctccgcttcgtccgcgcgccgcctgcgcgcggtcccgccctcccgcggcatccgctaccaggccctccgcgcggactccggtttcgccgggaaccgccggggtggcggccgtggagcgtcggtagtgtgcgcggtccagggccaggacacatccatccaagttccagaagtgacgaagtcaacatggcaatcacttgttatggagagcgagcttcctgtccttgttggatactgggctacatggtgtgggccttgcaaaatgattgatcccgttgttggcaagctctccaaggagtatgaagggaaactgaaatgctacaagctcaatactgacgagaatccagatatagcaagtcagtatggcgtccggagcatcccaaccatgatgatattcaagaacggagagaagaaagatgcagtgattggagctgtgcctgagagtacactgatcgcatccattgagaaatttgtcgagaggtaa

SEQ ID NO: 7970 - protein, 180 aa, Oryza sativa
MASALAASTAVCSSPLASASASASSARRLRAVPPSRGIRYQALRADSGFAGNRRGGGRGASVVCAVQGQDTSIQVPEVTKSTWQSLVMESELPVLVGYWATWCGPCKMIDPVVGKLSKEYEGKLKCYKLNTDENPDIASQYGVRSIPTMMIFKNGEKKDAVIGAVPESTLIASIEKFVER

SEQ ID NO: 7971 - DNA, 402 bp, Oryza sativa; identical to SEQ ID NO: 1168
  CDS (1)..(402)

SEQ ID NO: 7972 - protein, 133 aa, Oryza sativa; identical to SEQ ID NO: 1169

SEQ ID NO: 7973 - DNA, 543 bp, Oryza sativa
  CDS (1)..(543)
atggcgtccgcaccgagcaccaccgcgtccggcctcgcgccgccgccgttctcctcggcgcgcggcgcgcgcctcctccccggcgcgctgctgcgcctcccgccgcctccggcctcggtgggtagcttccgcgtggtggggcccgccgccgccccacccggcggccgccgcatcgccagcgcgcgcgtgcggtgtggcgcggcggtgaggttcatcgggcagagcgagttcgaggcggaggtgttgcagtcggacctgcccgtgctcgtcgacttcgtcgccgactggtgcgggccgtgccgcctcatcgcgcccgtcgtcgactgggccgccgaggaatatgaagggagattaaagattgtcaagattgatcatgatgccaatcctcaactgattgaagagtataaggtttatggtctcccatctcttattctattcaaggatgggaaagaggtaccagggagcagaagagaaggcgcaattacaaaagccaagttcaaggaatacctcgaacctctcttgtcaacctcaacagttgcttaa

SEQ ID NO: 7974 - protein, 180 aa, Oryza sativa
MASAPSTTASGLAPPPFSSARGARLLPGALLRLPPPPASVGSFRVVGPAAAPPGGRRIASARVRCGAAVRFIGQSEFEAEVLQSDLPVLVDFVADWCGPCRLIAPVVDWAAEEYEGRLKIVKIDHDANPQLIEEYKVYGLPSLILFKDGKEVPGSRREGAITKAKFKEYLEPLLSTSTVA

SEQ ID NO: 7975 - DNA, 399 bp, Oryza sativa
  CDS (1)..(399)
atgggaggttgtgtgggcaagggacgacgacatattgaggaagacaagcttgatttcaaaggtggaaatgttcatgtcataacaagcaaagaggactgggataggaagattgaagaagcaaacaaggatgggaaaattgttgtggcaaatttcagtgcttcctggtgtggaccatgtcgtgttattgcacctatttatgctgagatgtcaaagacttatcctcaactcatgttcttgacaatagatgttgatgacctaatggatttcagctcatcatgggatatccgcgcaacgccgacctttttcttcataaaaaacgagaagcaggtcgacaagcttgtgggcgccaacaaacctgagctcgaaaagaaggttcaggcacttgctgatggcagctga

SEQ ID NO: 7976 - protein, 132 aa, Oryza sativa
MGGCVGKGRRHIEEDKLDFKGGNVHVITSKEDWDRKIEEANKDGKIVVANFSASWCGPCRVIAPIYAEMSKTYPQLMFLTIDVDDLMDFSSSWDIRATPTFFFIKNEKQVDKLVGANKPELEKKVQALADGS

SEQ ID NO: 7977 - DNA, 408 bp, Oryza sativa
  CDS (1)..(408)
atgggttgctgtggcagcagcactgtagacgccgaggagcacctggactacagtggcggaaatgtgactttggtaactgatcaaaagaattgggacaatacaatggaagaagtagctgagcatggcaaaacagttgtgctaaaattcagtgcaatttggtgcactccgtgtaggaatgctgcccctctattcgctgaactttcactgaagtatcctgacattgttttcgtgtccgtggatgtagacgaaatgccggagctggtgacgcaatacgatgtgcgtgcaaccccaacgttcatcttcatgaaaaacaatgaggagattgataagcttgttggaggcaaccatgaagatcttcaggaaaagttcgaacagcttaaccggccaaagttatatgatgatgtataa

SEQ ID NO: 7978 - protein, 135 aa, Oryza sativa
MGCCGSSTVDAEEHLDYSGGNVTLVTDQKNWDNTMEEVAEHGKTVVLKFSAIWCTPCRNAAPLFAELSLKYPDIVFVSVDVDEMPELVTQYDVRATPTFIFMKNNEEIDKLVGGNHEDLQEKFEQLNRPKLYDDV

SEQ ID NO: 7979 - DNA, 525 bp, Oryza sativa
  CDS (1)..(525)
atggctctggctcaccgactctgccgtcttcctcgcctcctccccctcgccgccgccgccgccgcctccaaaccctacctccccggaaaacctagccccgcgcctcctcctcccctctcctccccgccgccgtttccctctctctcccgcctcttctccaccaccccctcctcctcaggtgattccagcatggtggtggtcggatcggcggagtccttcaccagcatcatgtccaaggtggaagcggagaagcttccggccgtgttctactacacggcggtatggtgcgggccttgtagagcgatggcacccgtgatttcaaaactgagcagccggtaccccaagatacctatctacaaagttgacattgacatggatggtgttggaagcaaactaagtgatctaaaaatattctctgtgccaacattccatttctactaccaaggtcggaagacaggtgaggtggttggtgctaatgcgacaaaacttgaatcaaccatggaaagtcttcacaagcaactatag

SEQ ID NO: 7980 - protein, 174 aa, Oryza sativa
MALAHRLCRLPRLLPLAAAAAASKPYLPGKPSPAPPPPLSSPPPFPSLSRLFSTTPSSSGDSSMVVVGSAESFTSIMSKVEAEKLPAVFYYTAVWCGPCRAMAPVISKLSSRYPKIPIYKVDIDMDGVGSKLSDLKIFSVPTFHFYYQGRKTGEVVGANATKLESTMESLHKQL

SEQ ID NO: 7981 - DNA, 417 bp, Oryza sativa; identical to SEQ ID NO: 1378
  CDS (1)..(417)

SEQ ID NO: 7982 - protein, 138 aa, Oryza sativa; identical to SEQ ID NO: 1379

SEQ ID NO: 7983 - DNA, 570 bp, Oryza sativa
  CDS (1)..(570)
atggccatggccgcggccgcctccctcctgccggcgagcgccgccccaaccctccccggacgcgccttccgcccgccccgcaactccaccccgacggcctccctctcctgcgatggcggctcccgctgccgcggcgtcggcctcggcgtcatcctcggtgggtgtcgcgcgcaaggcgttcgacggaatgccgcagccgagacctacgtcccaggctccggcaagtacatcgccccggactacctcgtgaagaaggtgacggccaaggaactggaggagctggtgaggggggagaggaaggtgcccctcatcgtggatttctacgcgacgtggtgcggaccctgcgtcctcatggcccaggacatcgagatgcttgcagttgaatatgaaaacaatgccctgtttgtgaaggtggatactgatgatgaatatgaacttgcaagagatatgcaggtaagaggacttccaacactgtatttcttcagtccagatcaaagcaaagacgccctaaggactgagggactgattcctattgatatgatcagaaatatcattgataatgaattgtga

SEQ ID NO: 7984 - protein, 189 aa, Oryza sativa
MAMAAAASLLPASAAPTLPGRAFRPPRNSTPTASLSCDGGSRCRGVGLGVILGGCRAQGVRRNAAAETYVPGSGKYIAPDYLVKKVTAKELEELVRGERKVPLIVDFYATWCGPCVLMAQDIEMLAVEYENNALFVKVDTDDEYELARDMQVRGLPTLYFFSPDQSKDALRTEGLIPIDMIRNIIDNEL

SEQ ID NO: 7985 - DNA, 387 bp, Zea mays; identical to SEQ ID NO: 1502
  CDS (1)..(387)

SEQ ID NO: 7986 - protein, 128 aa, Zea mays; identical to SEQ ID NO: 1503

SEQ ID NO: 7987 - DNA, 549 bp, Zea mays
  CDS (1)..(549)
atggccgccggcctcgccttccccgtcgcctcctttccactcgcctgcgtctcctcacctccccaccccgggcaccgcatctgctgcgcgatcccgtcgtcgtcctcgcgccgcaccgtcaaatcctcgccgctccgcgcgactaccgtcctctccagggaacgacggggcacgggccgtggcgcgtccgtagtgtgcgctgtccaaggccaggacacgaccatccaagtcccagatgtgacaaagtcaacatggcaatcactcgtgatcgagagcgagcttcctgtcctggttgagttctcggcggcatggtgcgggccatgcaagatgatagaaccagttgttggcaagctctcgaaggactacgaggggaagctgaaatgctacaagctaaacacagatgagagcccggacatcgcaagccagtacggggtccggagcatccccaccacgatgatcttcaaggatggcgagaagaaggattcggttatcggggccgtgccagagagcacactggtcacatgcatcgagaaatttgtcgagaggtag

SEQ ID NO: 7988 - protein, 182 aa, Zea mays
MAAGLAFPVASFPLACVSSPPHPGHRICCAIPSSSSRRTVKSSPLRATTVLSRERRGTGRGASVVCAVQGQDTTIQVPDVTKSTWQSLVIESELPVLVEFSAAWCGPCKMIEPVVGKLSKDYEGKLKCYKLNTDESPDIASQYGVRSIPTTMIFKDGEKKDSVIGAVPESTLVTCIEKFVER

SEQ ID NO: 7989 - DNA, 390 bp, Zea mays
  CDS (1)..(390)
atggagatccagcaccaccgggggctgggcaactccaaggttgtcaaggtgcagagcgaggaggcgtgggatctgttcaccgatcaagcgagcaacgaaggccggcccgttgttgcccatttcggagcgtcatggtgcgtgacgtccctgtccatgaactacaagtttgaggagctggcgcagacccaccccgaggtcttgttcctctacgtggacgtcgacgatgtccagagtgtttcatccaggtacggagtgaaggccatgccgacgttcttcctcatcaagagcaaggaggtggtggggaagatcgtcggggcgaacccagacgaggtgaagaagctggtggatgcttccgccgaacccttggagactcagatagtcgtggagtag

SEQ ID NO: 7990 - protein, 129 aa, Zea mays; identical to SEQ ID NO: 1495

SEQ ID NO: 7991 - DNA, 432 bp, Zea mays
  CDS (1)..(432)
atgggactgaggcgtctgatgagatgctgctgctgcattgcaaagcacgcggacgacggcgacaagatcgatttcggaggtggcaatgttcatgttgtcacaagcaaagaggactgggaccaaagaattgcggaggcaaacaaggatgggaaaaccgtggttgcaaacttcagcgcttcctggtgtgggccgtgccgtgtcatcgcacctgtctacgccgaaatgtcgcagacgtaccctcagctcatgttcctgacgatcgatgttgatgacttgatggagttcagctcgtcgtgggacatccgcgcgaccccgacgttcttcttcctcaagaacgagcagcaggtggacaagctggtcggcgccaacaagcctgagctggagaagaaagtggccgccgtcgccgacgcggccggcagcaagacagtgtag

SEQ ID NO: 7992 - protein, 143 aa, Zea mays
MGLRRLMRCCCCIAKHADDGDKIDFGGGNVHVVTSKEDWDQRIAEANKDGKTVVANFSASWCGPCRVIAPVYAEMSQTYPQLMFLTIDVDDLMEFSSSWDIRATPTFFFLKNEQQVDKLVGANKPELEKKVAAVADAAGSKTV

SEQ ID NO: 7993 - DNA, 372 bp, Brassica napus
  CDS (1)..(372)
atgggaactgtaatatcaaatctgctgggggcagatgaagggaatgaatccgagcatagtggcgtcactaagttgagctcatcagctcagtggcagcttcacttcaacgggatgaaagattcgaaccagctgctggtgattgacttcttcgcaagctggtgtgggccttgtaagttcatcgagcccgcgttcagacacatggctgtcaagttcactgatgttagcttcgtcaaggaggtggctagagagttcaacgtgaatgcgatgccaacttttgtgctggtgaaaaatggtaaagaggttgacaggatagttggaaccaaacaagctgaacttgagaataaagttaccaaacacagggggggacagtga

SEQ ID NO: 7994 - protein, 123 aa, Brassica napus
MGTVISNLLGADEGNESEHSGVTKLSSSAQWQLHFNGMKDSNQLLVIDFFASWCGPCKFIEPAFRHMAVKFTDVSFVKEVAREFNVNAMPTFVLVKNGKEVDRIVGTKQAELENKVTKHRGGQ

SEQ ID NO: 7995 - DNA, 387 bp, Brassica napus; identical to SEQ ID NO: 1406
  CDS (1)..(387)

SEQ ID NO: 7996 - protein, 128 aa, Brassica napus; identical to SEQ ID NO: 1407

SEQ ID NO: 7997 - DNA, 372 bp, Brassica napus; identical to SEQ ID NO: 1392
  CDS (1)..(372)

SEQ ID NO: 7998 - protein, 123 aa, Brassica napus; identical to SEQ ID NO: 1393

SEQ ID NO: 7999 - DNA, 546 bp, Brassica napus
  CDS (1)..(546)
atggctgctttcacctgtacctctcgtcctcccgtttccctccgttcggagtcaagaatcgcttcctctccatcagcttcactctctgctcggcggatgttcgccgtctcgcctgactcagcaggattgagaatccgtctttcccagtctccctcctcgttgacctcgaaggttcctcgaccacgaagaggcatcgtctgtgaggctcaggaaaccactacagatatagtttcaatagtcaacgacacaacatgggactctctagttctcaaggcggacgggcctgtactggtcgacttttgggcaccatggtgtggaccttgcaaaatgattgacccgctcgtgaacgaactagcaaaagagtacaccgggaaggtcaagttctacaaactgaacaccgacgactctccttcaaccccaagcaagtacaatgttagaagcatcccaacgatcatgatctttgtcaatggggagaagaaggatgcaatcataggtgcagtgcccagatctacgctcgcgtctagcattgataaattcttgcaatga

SEQ ID NO: 8000 - protein, 181 aa, Brassica napus
MAAFTCTSRPPVSLRSESRIASSPSASLSARRMFAVSPDSAGLRIRLSQSPSSLTSKVPRPRRGIVCEAQETTTDIVSIVNDTTWDSLVLKADGPVLVDFWAPWCGPCKMIDPLVNELAKEYTGKVKFYKLNTDDSPSTPSKYNVRSIPTIMIFVNGEKKDAIIGAVPRSTLASSIDKFLQ

SEQ ID NO: 8001 - DNA, 456 bp, Brassica napus; identical to SEQ ID NO: 1394
  CDS (1)..(456)

SEQ ID NO: 8002 - protein, 151 aa, Brassica napus; identical to SEQ ID NO: 1395

SEQ ID NO: 8003 - DNA, 354 bp, Brassica napus; identical to SEQ ID NO: 1396
  CDS (1)..(354)

SEQ ID NO: 8004 - protein, 117 aa, Brassica napus; identical to SEQ ID NO: 1397

SEQ ID NO: 8005 - DNA, 543 bp, Brassica napus
  CDS (1)..(543)
atggattgtatcgtctccagctcgacggttcttatccgatcacatctcactccaattcgctcagcttcctccgtatccgccaaacctctgagctcagcacaggtcacatccttcgctgctaaccgccacacactctcgttcaagtccgattacaaaagaatcagagcattctccactagcgcgtctacgataagatgcggcggaatcaaggagataggggagagtgagtttaccagcacggttcttgaatcggaccggccggttctggttaatttcgtcgccacgtggtgcggtccctgcaagttggtctatccagccacggaagctttatctcaggagtatggtgacaggttgacgattgtgaagattgatcacgacgcgaatccgaatttgatagcagagtacaaggtttatggtttaccgcattttatactctttaaggacggtaaggaagttgcaggtagcagaagggaaggtgcgattactaaagctaagcttaaggagtacattgatggtctcttgacctctatatcccctgcttaa

SEQ ID NO: 8006 - protein, 180 aa, Brassica napus
MDCIVSSSTVLIRSHLTPIRSASSVSAKPLSSAQVTSFAANRHTLSFKSDYKRIRAFSTSASTIRCGGIKEIGESEFTSTVLESDRPVLVNFVATWCGPCKLVYPATEALSQEYGDRLTIVKIDHDANPNLIAEYKVYGLPHFILFKDGKEVAGSRREGAITKAKLKEYIDGLLTSISPA

SEQ ID NO: 8007 - DNA, 546 bp, Brassica napus
  CDS (1)..(546)
atggctgctttcgcgtgtactactcgtccgccaatttctctccggtcagagaagaggatcgcatcctcaacgaaagtttcactctccactactcgacaaatgttctccgtgggaggaggattgaggactcgcgtctctctatcatcggtctccaagaattctagcgattctcgattacgacgacgaggagggatcatcatctgtgaagctcaggacactactacagggattccaatggtgaacgattcaacatgggagtcgctagtactcaaggctgatgagcctgttgttgtggacttttgggcaccatggtgtggaccctgcaaaatgattgatcccattgtcaacgaactagcacagcagtacacagggaagatcaagttcttcaaactaaacactgacgattctccggcgaccccgggaaagtacggtgtcagaagcataccaaccatcatgatcttcgttaagggagagaagaaggatacgatcatcggtgcagtgcctaaaaccacattagcaacaagcattgataaattcttgcagtga

SEQ ID NO: 8008 - protein, 181 aa, Brassica napus
MAAFACTTRPPISLRSEKRIASSTKVSLSTTRQMFSVGGGLRTRVSLSSVSKNSSDSRLRRRGGIIICEAQDTTTGIPMVNDSTWESLVLKADEPVVVDFWAPWCGPCKMIDPIVNELAQQYTGKIKFFKLNTDDSPATPGKYGVRSIPTIMIFVKGEKKDTIIGAVPKTTLATSIDKFLQ

SEQ ID NO: 8009 - DNA, 381 bp, Brassica napus; identical to SEQ ID NO: 1382
  CDS (1)..(381)

SEQ ID NO: 8010 - protein, 126 aa, Brassica napus; identical to SEQ ID NO: 1383

SEQ ID NO: 8011 - DNA, 360 bp, Brassica napus
  CDS (1)..(360)
atggcggcagaagagggacaagtgatcggttgccacgagattgatgtatgggccgtgcagctcgacacagccaaacaatccaacaagctgattgtgatagatttcactgcttcatggtgcccaccatgccgcatgattgctccagttttcgcagatctggccaagaagttcatgtcaagtgccatcttcttcaaggtggacgtcgatgaactgcagaatgtagctcaagagtttggtgtggaggcaatgccgacctttgtgttcatcaaagacggaaatgttgttgataaggtcgttggtgcaaggaaggaagatcttcatgccacaatagccaagcatactggtgttgctactgcttaa

SEQ ID NO: 8012 - protein, 119 aa, Brassica napus
MAAEEGQVIGCHEIDVWAVQLDTAKQSNKLIVIDFTASWCPPCRMIAPVFADLAKKFMSSAIFFKVDVDELQNVAQEFGVEAMPTFVFIKDGNVVDKVVGARKEDLHATIAKHTGVATA

SEQ ID NO: 8013 - DNA, 579 bp, Brassica napus
  CDS (1)..(579)
atggcttcctttctcgattccgtaaccgtcacccgcgtgttttctcttcccatcacttcctcgatttcacctgcttcaaaggttccgtcagtctctgcccggcggatctctcccgttccggaattcagaggtttgaaagcttcccggaagagttcggtgactcagtcagcgagtcttggtacgaatctcggatcccgattcgctcgtggtggtagaatcgtctgcgaggctcaggacaccactgccgccgccgtcgaagttccaaacatctctgattcagaatggcaaacacaggttctcgagtcagatgtaccagtattggtcgagttttgggcaccttggtgtggaccttgccgtatgattcaccccattgttgaccaactggccaaggacttcgctggtaagttcaaattctacaaaatcaacaccgacgagagcccaaacacagccaaccgttacgggatacgcagcgttcctaccgtgatcatattcaaagacggtgagaagaaagacagtatcatcggagctgtccctaaagagacgttggagaaaactatagaaagattcgtggtcgagtaa

SEQ ID NO: 8014 - protein, 192 aa, Brassica napus
MASFLDSVTVTRVFSLPITSSISPASKVPSVSARRISPVPEFRGLKASRKSSVTQSASLGTNLGSRFARGGRIVCEAQDTTAAAVEVPNISDSEWQTQVLESDVPVLVEFWAPWCGPCRMIHPIVDQLAKDFAGKFKFYKINTDESPNTANRYGIRSVPTVIIFKDGEKKDSIIGAVPKETLEKTIERFVVE

SEQ ID NO: 8015 - DNA, 546 bp, Brassica napus; identical to SEQ ID NO: 1398
  CDS (1)..(546)

SEQ ID NO: 8016 - protein, 181 aa, Brassica napus; identical to SEQ ID NO: 1399

SEQ ID NO: 8017 - DNA, 558 bp, Brassica napus
  CDS (1)..(558)
atggctgctgctttcacctgtacctctctccctccgctctctctccgttcagagacgaaagccgcagcatcctcctcactctcagctcgccggctcttcgccgtgtcgccggaatcaggaggattgagaatccgtctttctcagtcgccgtcctcgttgacctcgattcaacctagggttcctcgattacgaagaggcgtcgtcgtcgtctgcgaagctcaggaaaccacgactgacatagtttcaatagtgaacgactcgacgtgggattctctggttctcaaggcagacggccctgtacttgtcgacttctgggcaccatggtgtggaccttgcaaaatgattgacccgctcgtgaatgagctagcacaacagtacaccgggaaggtcaagttctacaaactaaacaccgacgactctccttcaaccccaagccagtacaatgttagaagcatcccaacgatcatgatctttgtcgatggcgagaagaaggacgcaatcataggtgcagtgcccaaatccacactcacgtctagcattgacaagttcttgcaatga

SEQ ID NO: 8018 - protein, 185 aa, Brassica napus
MAAAFTCTSLPPLSLRSETKAAASSSLSARRLFAVSPESGGLRIRLSQSPSSLTSIQPRVPRLRRGVVVVCEAQETTTDIVSIVNDSTWDSLVLKADGPVLVDFWAPWCGPCKMIDPLVNELAQQYTGKVKFYKLNTDDSPSTPSQYNVRSIPTIMIFVDGEKKDAIIGAVPKSTLTSSIDKFLQ

SEQ ID NO: 8019 - DNA, 540 bp, Brassica napus; identical to SEQ ID NO: 1400
  CDS (1)..(540)

SEQ ID NO: 8020 - protein, 179 aa, Brassica napus; identical to SEQ ID NO: 1401

SEQ ID NO: 8021 - DNA, 543 bp, Brassica napus
  CDS (1)..(543)
atgcctctctctctccgtctcgctccatctcctacggctttagcttcaaccaccggtggatatggtcctgttaagaagcagtgccgcatcccttactccggcgtcgccaccacgaggattggtttcttctcattggattatggaaaaagggtagaatcctctgtggtgaggtgtagcttagagacagtgaatgtaaatgttggtcaagtgaaggaagtggataaggacaccttctggcccatcgttaaagccgctggtgaaaagattattgtacttgacatgtacactcaatggtgtggaccatgtaaagtgattgcacctaagtacaaagctttatcagagaagtacgaggacgttgtatttcttaagcttgactgcaaccctgaaaacaggccattagtaaaggagctaggattaagagtggttccaactttcaaaatctttaaggataataaagtcgtcaaggaagttactggtgccaaatatgataatctggttgaagcaattgaaacagccaggtctgctggtggttcttcgggatga

SEQ ID NO: 8022 - protein, 180 aa, Brassica napus
MPLSLRLAPSPTALASTTGGYGPVKKQCRIPYSGVATTRIGFFSLDYGKRVESSVVRCSLETVNVNVGQVKEVDKDTFWPIVKAAGEKIIVLDMYTQWCGPCKVIAPKYKALSEKYEDVVFLKLDCNPENRPLVKELGLRVVPTFKIFKDNKVVKEVTGAKYDNLVEAIETARSAGGSSG

SEQ ID NO: 8023 - DNA, 423 bp, Brassica napus; identical to SEQ ID NO: 1402
  CDS (1)..(423)

SEQ ID NO: 8024 - protein, 140 aa, Brassica napus; identical to SEQ ID NO: 1403

SEQ ID NO: 8025 - DNA, 564 bp, Brassica napus; identical to SEQ ID NO: 1404
  CDS (1)..(564)

SEQ ID NO: 8026 - protein, 187 aa, Brassica napus; identical to SEQ ID NO: 1405

SEQ ID NO: 8027 - DNA, 540 bp, Brassica napus
  CDS (1)..(540)
atggctgcttttgcgtgcactactcgtccgccgatttctctccggtcagagatgaggatcgcatcctcaacgaaagtttcactctccactcgacaaatgttctccgtgggaggattgaggactcgcgtctctctatcatcggtctccaagaattctagcgcttctcgattacgacgacgaggagggttcatcatctgtgaagctcaggacactgctacagggattccaatggtgaacgattcaacgtgggagtcactagtactcaaggctgatgagcctgttgttgtggacttttgggcaccatggtgtggaccctgcaaaatgattgatcccattgtcaacgaactagcacagcagtacactgggaagatcaagttcttcaaactaaacactgacgattctccggcgaccccgggaaagtacggtgttagaagcataccaaccatcatgatcttcgttaagggagagaagaaggatacaatcatcggtgcagtgcctaaaaccacattagcaacaagcattgataaattcttgcagtga

SEQ ID NO: 8028 - protein, 179 aa, Brassica napus
MAAFACTTRPPISLRSEMRIASSTKVSLSTRQMFSVGGLRTRVSLSSVSKNSSASRLRRRGGFIICEAQDTATGIPMVNDSTWESLVLKADEPVVVDFWAPWCGPCKMIDPIVNELAQQYTGKIKFFKLNTDDSPATPGKYGVRSIPTIMIFVKGEKKDTIIGAVPKTTLATSIDKFLQ

SEQ ID NO: 8029 - DNA, 549 bp, Brassica napus
  CDS (1)..(549)
atggattgtatcgtctccagctcgacggttcttatccgatcacatctcactccaattcgctcagcttcctccgtatccgccaaacctctaagctcagcaaaagtcgcatccttcgcgtctaaccgccacatactctcgttcaagtccggtggtaaaagaaacagaacactctccaccaacgcttcgagttctacgataaggtgcggtggaattaaagagatcggagagagcgagtttaccagcacggttcttgaatcggaccggccggttctggttaatttcgtcgccacgtggtgcggtccctgcaagttggtctatccagccacggaagctttatctcaggagtatggtgacaggttgacgattgtgaagattgaccacgacgcgaatcctaatttgatagcagagtacaaggtttatggtttaccgcattttatactctttaaggatggtaaggaagttgctggtagcagaagggaaggtgcgattactaaagctaagcttaaggagtacattgatggtctcttgacctctatatcccctgcttaa

SEQ ID NO: 8030 - protein, 182 aa, Brassica napus
MDCIVSSSTVLIRSHLTPIRSASSVSAKPLSSAKVASFASNRHILSFKSGGKRNRTLSTNASSSTIRCGGIKEIGESEFTSTVLESDRPVLVNFVATWCGPCKLVYPATEALSQEYGDRLTIVKIDHDANPNLIAEYKVYGLPHFILFKDGKEVAGSRREGAITKAKLKEYIDGLLTSISPA

SEQ ID NO: 8031 - DNA, 456 bp, Brassica napus; identical to SEQ ID NO: 1408
  CDS (1)..(456)

SEQ ID NO: 8032 - protein, 151 aa, Brassica napus; identical to SEQ ID NO: 1409

SEQ ID NO: 8033 - DNA, 552 bp, Brassica napus
  CDS (1)..(552)
atgcctctgtctctgcgtctcgctccatctcctacggctttatctccgacaaccggcggatttagtcctgcgaaaaagcagtgtcgtatcccttcttactccggcgtggcgacgacgacgaggaggattggtttgtgctcattggattatgtgaaaaggggagactcctctgtggtgaggtgtagcttagagaccgtgaatgtcagtgttggtcaagtgacggaagtggataaggataccttctggcccatcgttaaagccgccggtgaaaagattgtggtacttgacatgtacactcaatggtgtggtccatgtaaagtgattgctcccaagtacaaagctttatcagagaagtatgaggacgttgtgtttctaaagcttgactgcaaccctgaaaacaggccgttagtaaaggagttaggattaagagtggttccaactttcaaaatctttaaggataataaagtcgtcaaggaagttaccggtgccaaatatgataatctggtcgaagccattgaaacggccaggtctgctgctggttcttcggggtga

SEQ ID NO: 8034 - protein, 183 aa, Brassica napus
MPLSLRLAPSPTALSPTTGGFSPAKKQCRIPSYSGVATTTRRIGLCSLDYVKRGDSSVVRCSLETVNVSVGQVTEVDKDTFWPIVKAAGEKIVVLDMYTQWCGPCKVIAPKYKALSEKYEDVVFLKLDCNPENRPLVKELGLRVVPTFKIFKDNKVVKEVTGAKYDNLVEAIETARSAAGSSG

SEQ ID NO: 8035 - DNA, 564 bp, Brassica napus; identical to SEQ ID NO: 1410
  CDS (1)..(564)

SEQ ID NO: 8036 - protein, 187 aa, Brassica napus; identical to SEQ ID NO: 1411

SEQ ID NO: 8037 - DNA, 540 bp, Brassica napus
  CDS (1)..(540)
atggctgctttcgcgtgtactactcgtccgccgatttctctccggtcagagatgatgatcgcatcctcaacgaaagtttcactctctactcgacaaatgttctccgtgggaggattgaggactcgcgtctctctatcatcggtctccaagaattctagggcttctcgattacgacgacgaggagggatcatcatctgtgaagctcaggacactgctacagggattccaatggtgaacgattcaacatgggagtctctagtactcaaggctgatgagcctgttgttgtggacttttgggcaccatggtgtggaccctgcaaaatgattgatcccattgtcaacgaactagcacagcagtacactgggaagatcaagttcttcaaactaaacactgacgattctccggcgaccccgggaaagtacggtgtgagaagcataccaaccatcatgatcttcgttaagggagagaagaaggatacaatcatcggtgcagtgcctaaaaccacattagcaacaagcattgataaattcttgcagtga

SEQ ID NO: 8038 - protein, 179 aa, Brassica napus
MAAFACTTRPPISLRSEMMIASSTKVSLSTRQMFSVGGLRTRVSLSSVSKNSRASRLRRRGGIIICEAQDTATGIPMVNDSTWESLVLKADEPVVVDFWAPWCGPCKMIDPIVNELAQQYTGKIKFFKLNTDDSPATPGKYGVRSIPTIMIFVKGEKKDTIIGAVPKTTLATSIDKFLQ

SEQ ID NO: 8039 - DNA, 354 bp, Brassica napus; identical to SEQ ID NO: 1412
  CDS (1)..(354)

SEQ ID NO: 8040 - protein, 117 aa, Brassica napus; identical to SEQ ID NO: 1413

SEQ ID NO: 8041 - DNA, 519 bp, Brassica napus
  CDS (1)..(519)
atggcggctacttctctctcaccatctacaatcccatctctgaatcggaaagactcgtccactgtttccgctttcactccgcgctctatctccgccgtcaaattccagttcccacttcgccggattcgaaccggagacttaaacctctcctcgctatcttcatcaactcgatccactccccgcgctattgaagcaaagaagcagacgtacgactcgttcgatgacctccttgtgaactctgacaagcctgttcttgtcgacttctacgcgacctggtgtggtccctgtcagttcatggttccgattctcagcgaagtgagtgaaacattgaaagacaagatccaggtggtgaagattgataccgagaagtacccgagtattgctaataaatacaagatcgaggcgcttcctacgcttatcttattcaaagatggggagccttgtgaccgatttgagggtgctttggcggcgaatcaacttgttcaatggattgaagattctcttgaagtgaagacttag

SEQ ID NO: 8042 - protein, 172 aa, Brassica napus
MAATSLSPSTIPSLNRKDSSTVSAFTPRSISAVKFQFPLRRIRTGDLNLSSLSSSTRSTPRAIEAKKQTYDSFDDLLVNSDKPVLVDFYATWCGPCQFMVPILSEVSETLKDKIQVVKIDTEKYPSIANKYKIEALPTLILFKDGEPCDRFEGALAANQLVQWIEDSLEVKT

SEQ ID NO: 8043 - DNA, 546 bp, Brassica napus; identical to SEQ ID NO: 1414
  CDS (1)..(546)

SEQ ID NO: 8044 - protein, 181 aa, Brassica napus; identical to SEQ ID NO: 1415

SEQ ID NO: 8045 - DNA, 543 bp, Brassica napus
  CDS (1)..(543)
atggattgtattgtctccagctcgacggttcttatccgatcacatctcactccaattcgctcagcttcctccgtatccgccaaacctctgagctcagcacaggtcacatccttcgctgctaaccgccacacactctcgttcaagtccgattacaaaagaatcagagcattctccactagcgcgtctacgataagatgcggcggaatcaaggagataggggagagtgagtttaccagcacggttcttgaatcggaccggccggttctggttaatttcgtcgccacgtggtgcggtccctgcaagttggtctatccagccacggaagctttatctcaggagtatggtgacaggttgacgattgtgaagattgatcacgacgcgaatccgaatttgatagcagagtacaaggtttatggtttaccgcattttatactctttaaggacggtaaggaagttgcaggtagcagaagggaaggtgcgattactaaagctaagcttaaggagtacattgatggtctcttgacctctatatccgttgcttaa

SEQ ID NO: 8046 - protein, 180 aa, Brassica napus
MDCIVSSSTVLIRSHLTPIRSASSVSAKPLSSAQVTSFAANRHTLSFKSDYKRIRAFSTSASTIRCGGIKEIGESEFTSTVLESDRPVLVNFVATWCGPCKLVYPATEALSQEYGDRLTIVKIDHDANPNLIAEYKVYGLPHFILFKDGKEVAGSRREGAITKAKLKEYIDGLLTSISVA

SEQ ID NO: 8047 - DNA, 540 bp, Brassica napus; identical to SEQ ID NO: 1416
  CDS (1)..(540)

SEQ ID NO: 8048 - protein, 179 aa, Brassica napus; identical to SEQ ID NO: 1417

SEQ ID NO: 8049 - DNA, 402 bp, Brassica napus; identical to SEQ ID NO: 1418
  CDS (1)..(402)

SEQ ID NO: 8050 - protein, 133 aa, Brassica napus; identical to SEQ ID NO: 1419

SEQ ID NO: 8051 - DNA, 561 bp, Brassica napus; identical to SEQ ID NO: 1420
  CDS (1)..(561)

SEQ ID NO: 8052 - protein, 186 aa, Brassica napus; identical to SEQ ID NO: 1421

SEQ ID NO: 8053 - DNA, 372 bp, Brassica napus; identical to SEQ ID NO: 1344
  CDS (1)..(372)

SEQ ID NO: 8054 - protein, 123 aa, Brassica napus; identical to SEQ ID NO: 1345

SEQ ID NO: 8055 - DNA, 345 bp, Brassica napus; identical to SEQ ID NO: 1422
  CDS (1)..(345)

SEQ ID NO: 8056 - protein, 114 aa, Brassica napus; identical to SEQ ID NO: 1423

SEQ ID NO: 8057 - DNA, 579 bp, Brassica napus
  CDS (1)..(579)
atggcttccttgctcgattccgtcaccgttacccgcgtgttttctcttccgatcacttcctcgatttcacctgcttcaaaggttccgtcaatctctgcccggaggatttctcccgttccggaattcagaggtttgaaagcttcctggaggagttcggtgactcagtcagcgagtcttggtacgaatctcggatcccgattcgctcgtggtggtagaatcgtctgcgaggctcaggacaccactgccgccgccgtcgaagtaccaaacatctctgactcagaatggcaaacacaggttctcgagtcagatgtaccagtattggtcgagttttgggcaccgtggtgtggaccttgccgtatgattcaccccattgttgaccaactggccagggatttcgcaggcaagttcaaattctacaaaatcaacaccgacgagagcccaaacacagccaaccgttacgggatacgcagcgttcctaccgtgatcatattcaaagacggtgagaagaaagacagtatcatcggagctgtccctaaagagacgttggagaaaactatagaaagattcgtggtcgagtaa

SEQ ID NO: 8058 - protein, 192 aa, Brassica napus
MASLLDSVTVTRVFSLPITSSISPASKVPSISARRISPVPEFRGLKASWRSSVTQSASLGTNLGSRFARGGRIVCEAQDTTAAAVEVPNISDSEWQTQVLESDVPVLVEFWAPWCGPCRMIHPIVDQLARDFAGKFKFYKINTDESPNTANRYGIRSVPTVIIFKDGEKKDSIIGAVPKETLEKTIERFVVE

SEQ ID NO: 8059 - DNA, 522 bp, Zea mays
  CDS (1)..(522)
atggccttcctcctcgccgtcgccgtctccgtcgcagcgcctgcgtcgtggccttccccggtcgccaccgtcgccccgccccgcctcgccctccgccgaggcctcccgccgacgtggcgcgcagttcgagccctcccgcgttcccgtggcgccgtcgtggtgtgccaggcccagggcggccaggacactgcaatccaagttcctgatgtgagcaaatccacatggcaatcacttgtggtggagagcgagcttcccgtccttgttgagttctgggcttcatggtgcggaccgtgtaagatgatagaccccatcgttggcaagctctcaaaggagtacgaaggaaagctgaaatgttacaagctaaacactgacgagaaccctgacatcgcaacccaattcggcatccggagcatccccaccatgatgatattcaagaacggtgagaagaaggactcggtgattggagccgtgccagaaagcaccctcgtcacctgcattgataagtatgttggtgggaggtga

SEQ ID NO: 8060 - protein, 173 aa, Zea mays
MAFLLAVAVSVAAPASWPSPVATVAPPRLALRRGLPPTWRAVRALPRSRGAVVVCQAQGGQDTAIQVPDVSKSTWQSLVVESELPVLVEFWASWCGPCKMIDPIVGKLSKEYEGKLKCYKLNTDENPDIATQFGIRSIPTMMIFKNGEKKDSVIGAVPESTLVTCIDKYVGGR

SEQ ID NO: 8061 - DNA, 372 bp, Glycine max; identical to SEQ ID NO: 1434
  CDS (1)..(372)

SEQ ID NO: 8062 - protein, 123 aa, Glycine max; identical to SEQ ID NO: 1435

SEQ ID NO: 8063 - DNA, 360 bp, Glycine max; identical to SEQ ID NO: 1424
  CDS (1)..(360)

SEQ ID NO: 8064 - protein, 119 aa, Glycine max; identical to SEQ ID NO: 1425

SEQ ID NO: 8065 - DNA, 366 bp, Glycine max
  CDS (1)..(366)
atggccatggcatatgttgctagatcatcggagtcatctcaagtgcttaatttccattccactgctaaatggaatgctcactttgatgccttgaaacaaactaacaaactgatggtggttgatttcactgcttcatggtgtggaccttgcaaactcatggacccagttatccaagagtttgctacaaaatacagagatgttgagtttgtcaagattgatgtggatgagttaatggaggtatctcaacattaccaagtgcagggaatgccaactttcatgctgattaagaaaggcaaagtggctgataaagtggtgggagtgagaaaggaggagctacaaaggttgattgaacaacacagaaaataa

SEQ ID NO: 8066 - protein, 121 aa, Glycine max
MAMAYVARSSESSQVLNFHSTAKWNAHFDALKQTNKLMVVDFTASWCGPCKLMDPVIQEFATKYRDVEFVKIDVDELMEVSQHYQVQGMPTFMLIKKGKVADKVVGVRKEELQRLIEQHRK

SEQ ID NO: 8067 - DNA, 381 bp, Glycine max; identical to SEQ ID NO: 1426
  CDS (1)..(381)

SEQ ID NO: 8068 - protein, 126 aa, Glycine max; identical to SEQ ID NO: 1427

SEQ ID NO: 8069 - DNA, 546 bp, Glycine max
  CDS (1)..(546)
atggccctggagaactgtttgcgagtgaccacagtaggcacagccacaccccaatgcttttctccattttttccatcttcaagggataaacttgtcttcccaactcacagaggtttcaagaaatccttgcaaaactcaacactgtcatacccttatctttactccaccggtgctgcctatagaaaatcccgttttgtttgcaatgctcgtgaagcagtaaatgaagttaaagtggtgactgactcaagctggaacaaccttgtcattgcaagtgagacccctgtgctggtagagttttgggcaccatggtgtggtccatgcaggatgatagcacctgctatcgatgagctagcgaaggaatatgctggaaaaattgcatgctttaagcttaacacagatgattctccaaacatagcaacacagtacggcatcagaagcataccaacagttctgttcttcaagaatggagagaaaaaagaaagcataattggtgcagttcccaaatccactctgtccgcaacagtggaaaaatacgttgattcataa

SEQ ID NO: 8070 - protein, 181 aa, Glycine max
MALENCLRVTTVGTATPQCFSPFFPSSRDKLVFPTHRGFKKSLQNSTLSYPYLYSTGAAYRKSRFVCNAREAVNEVKVVTDSSWNNLVIASETPVLVEFWAPWCGPCRMIAPAIDELAKEYAGKIACFKLNTDDSPNIATQYGIRSIPTVLFFKNGEKKESIIGAVPKSTLSATVEKYVDS

SEQ ID NO: 8071 - DNA, 363 bp, Glycine max; identical to SEQ ID NO: 1446
  CDS (1)..(363)

SEQ ID NO: 8072 - protein, 120 aa, Glycine max; identical to SEQ ID NO: 1447

SEQ ID NO: 8073 - DNA, 528 bp, Glycine max
  CDS (1)..(528)
atggcggtctccgtttccgcgtcctccgcgattgcttctttgaactccgaactctccacgcgcttgccaccctcactcgcctccgcatcttcttccgccaagcaatcctttctgcaattcccgtcgtgcacgcgccttcttcggattagcactccacgcgctcccgctccatcgcgacctcgattccttcctctggttcaagcgaagaaacaaacctataactcgtttgacgatttgcttgccaattctgagaaacctgtgttggttgacttctatgcaacctggtgtggtccttgtcaatttatggttcccatactcaatgaagtaagcactcggcttaaggataagatacaggtggtgaagattgatactgagaagtatcctagcattgctgacaaatacagaattgaggccttgccgactttcatcatgtttaaggatggagaaccttatgatcgctttgagggagcattgactgcagatcagctcattgaacgcatagaagccggcctcaaggttaagcaataa

SEQ ID NO: 8074 - protein, 175 aa, Glycine max
MAVSVSASSAIASLNSELSTRLPPSLASASSSAKQSFLQFPSCTRLLRISTPRAPAPSRPRFLPLVQAKKQTYNSFDDLLANSEKPVLVDFYATWCGPCQFMVPILNEVSTRLKDKIQVVKIDTEKYPSIADKYRIEALPTFIMFKDGEPYDRFEGALTADQLIERIEAGLKVKQ

SEQ ID NO: 8075 - DNA, 354 bp, Glycine max; identical to SEQ ID NO: 1430
  CDS (1)..(354)

SEQ ID NO: 8076 - protein, 117 aa, Glycine max; identical to SEQ ID NO: 1431

SEQ ID NO: 8077 - DNA, 546 bp, Glycine max
  CDS (1)..(546)
atgggcatggagaactgtttacgagtgaccacagtaggcacagccacaccccaatgcctttctccattctttccatcttcaagggataagcttgtcttcccaactcacagaggtttcaagaaatccttgcaaaactcaacactgtcatgcccttctctttactcaaccggtgctgcctatagaaagtcccgttttgtttgcaatgctcgtgaagcagtaaatgaagttaaagtggtgactgactcaagctggaataaccttgtgattgcaagtgagacccctgtgctggtagagttttgggcaccgtggtgtggtccatgcaggatgatagcgcctgttatcgatgagttagcaaaggattatgctggaaaaattgcatgctacaagcttaacacagatgattctccaaacatagcaacacagtacggcatcagaagcataccaacagttctgttcttcaagaatggagagaaaaaagaaagcataattggcgccgttcccaaatctacactgtccgcaacagtggaaaaatatgttgaattataa

SEQ ID NO: 8078 - protein, 181 aa, Glycine max
MGMENCLRVTTVGTATPQCLSPFFPSSRDKLVFPTHRGFKKSLQNSTLSCPSLYSTGAAYRKSRFVCNAREAVNEVKVVTDSSWNNLVIASETPVLVEFWAPWCGPCRMIAPVIDELAKDYAGKIACYKLNTDDSPNIATQYGIRSIPTVLFFKNGEKKESIIGAVPKSTLSATVEKYVEL

SEQ ID NO: 8079 - DNA, 546 bp, Glycine max
  CDS (1)..(546)
atggctctgaatctttgtatctcacctaactgtaaatgggtttcatctcctgcttccttagatagtgcatcttctttgagatcttcacttggttcttgttttggtaacataaacattgctagtgtgagtttaagcactagtagaagtttgagtttgaggaggagtgggagtgttagtgtaagatctagtttggaaactacggggcccacagtcacagtgggacaggtcactgaggttaacaaggataccttctggccgatcgttaaggctgccggggataaaaccgttgtccttgacatgtacacacaatggtgtggcccttgcaaagtgatggctccaaagtttcaagaattatctgaaaagtatctggatgttgtctttctaaagcttgattgcaaccaagacaacaggcccttggcaatagagctgggaattaaagtggttcccactttcaaaattctgaaggacaacaaggttgtaaaagaagttactggagctaaatacgatgatttggttgatgccatagacaaagttcgatctagctaa

SEQ ID NO: 8080 - protein, 181 aa, Glycine max
MALNLCISPNCKWVSSPASLDSASSLRSSLGSCFGNINIASVSLSTSRSLSLRRSGSVSVRSSLETTGPTVTVGQVTEVNKDTFWPIVKAAGDKTVVLDMYTQWCGPCKVMAPKFQELSEKYLDVVFLKLDCNQDNRPLAIELGIKVVPTFKILKDNKVVKEVTGAKYDDLVDAIDKVRSS

SEQ ID NO: 8081 - DNA, 417 bp, Glycine max; identical to SEQ ID NO: 1432
  CDS (1)..(417)

SEQ ID NO: 8082 - protein, 138 aa, Glycine max; identical to SEQ ID NO: 1433

SEQ ID NO: 8083 - DNA, 540 bp, Glycine max
  CDS (1)..(540)
atggctctgaatctttgtatctcacctaagtttaaatgggttccttccttagatagtgcttcctattctttgagaccttcacttgggtcttgttttggtaacataaacattgctagtgtgagtctaagtactactagaagtttgagtttgaggaggagtgggagtgttagtgtaagatctagtttagaaactgcggggcccacagtcacagtgggacaggtcactgaggttaacaaggacaccttctggccgatcgttaaggctgccggggataaaaccgttgtccttgacatgtacacacaatggtgtggcccttgcaaagtgatggctccaaagtttcaagaattatctgaaaagtatctggatgttgtctttctaaagcttgattgcaaccaagacaacaggcccttggcaatagagctgggaattaaagtggttcccactttcaaaattctgaaggacaacaaggttgtaaaagaagttactggagctaaatacgatgatttggttgatgccattgacaaagttcgatctagctaa

SEQ ID NO: 8084 - protein, 179 aa, Glycine max
MALNLCISPKFKWVPSLDSASYSLRPSLGSCFGNINIASVSLSTTRSLSLRRSGSVSVRSSLETAGPTVTVGQVTEVNKDTFWPIVKAAGDKTVVLDMYTQWCGPCKVMAPKFQELSEKYLDVVFLKLDCNQDNRPLAIELGIKVVPTFKILKDNKVVKEVTGAKYDDLVDAIDKVRSS

SEQ ID NO: 8085 - DNA, 528 bp, Glycine max
  CDS (1)..(528)
atggcggtctccgtttccgcgtcctccgcgattgcttctttgaactccgaacgctccacgcgcttggcaccctcactcgtctccgcatcttcttccgccaagcaatcctcgctgcaattcacgtcgcccacgcgccttcttcggattagtactccacgcgctcccgctccttcgcgacctcgattccttcctctggttcaagcgaagaaacaaacctataactcgtttgaagatttgcttgccaattctgaaaagcctgtgttggttgacttctatgcaacctggtgtggtccttgtcaattcatggttcccatactcaatgaagttagcactcggcttcaggataagatacaggtggtgaagattgatactgagaagtatccaaccattgctgacaaatacagaattgaggcgttgccgactttcatcatgtttaaggatggagatccttatgatcgctttgagggagcattgactgcagatcagctcattgaacgcattgaagctggcctcaaggttaagcaataa

SEQ ID NO: 8086 - protein, 175 aa, Glycine max
MAVSVSASSAIASLNSERSTRLAPSLVSASSSAKQSSLQFTSPTRLLRISTPRAPAPSRPRFLPLVQAKKQTYNSFEDLLANSEKPVLVDFYATWCGPCQFMVPILNEVSTRLQDKIQVVKIDTEKYPTIADKYRIEALPTFIMFKDGDPYDRFEGALTADQLIERIEAGLKVKQ

SEQ ID NO: 8087 - DNA, 363 bp, Glycine max; identical to SEQ ID NO: 1452
  CDS (1)..(363)

SEQ ID NO: 8088 - protein, 120 aa, Glycine max; identical to SEQ ID NO: 1453

SEQ ID NO: 8089 - DNA, 354 bp, Glycine max; identical to SEQ ID NO: 1450
  CDS (1)..(354)

SEQ ID NO: 8090 - protein, 117 aa, Glycine max; identical to SEQ ID NO: 1451

SEQ ID NO: 8091 - DNA, 510 bp, Glycine max
  CDS (1)..(510)
atggcaacactcttcgactctctcgccgtcgtgcgtctccccaccgccgcccgccggacctccgttatgctcccgcactgcgctggcctcaggctcagacccgccgccgcttcgcgcctagttgcgtcccccgctcgcaggatcgcttctcgcgcagcgcgcgtcgcctgcgaggctcaggacaccgccgtggaagtggctcctattactgatgcaaactggcaatcccttgtccttgaatccgaatctgctgttttggttgaattctgggcgccatggtgtggtccctgccgaatgattcaccctataattgatgaacttgcaaagcaatatgctgggaagctcaagtgttacaaactcaacactgatgagagcccttcaaccgctactcggtatggaattcgaagcatcccaactgttatgatcttcaagagtggtgagaagaaagatacagttattggtgctgtgcccaagtcaacattgaccacgagcatagaaaaattcttgtga

SEQ ID NO: 8092 - protein, 169 aa, Glycine max
MATLFDSLAVVRLPTAARRTSVMLPHCAGLRLRPAAASRLVASPARRIASRAARVACEAQDTAVEVAPITDANWQSLVLESESAVLVEFWAPWCGPCRMIHPIIDELAKQYAGKLKCYKLNTDESPSTATRYGIRSIPTVMIFKSGEKKDTVIGAVPKSTLTTSIEKFL

SEQ ID NO: 8093 - DNA, 375 bp, Glycine max; identical to SEQ ID NO: 1436
  CDS (1)..(375)

SEQ ID NO: 8094 - protein, 124 aa, Glycine max; identical to SEQ ID NO: 1437

SEQ ID NO: 8095 - DNA, 423 bp, Glycine max; identical to SEQ ID NO: 1438
  CDS (1)..(423)

SEQ ID NO: 8096 - protein, 140 aa, Glycine max; identical to SEQ ID NO: 1439

SEQ ID NO: 8097 - DNA, 414 bp, Glycine max; identical to SEQ ID NO: 1440
  CDS (1)..(414)

SEQ ID NO: 8098 - protein, 137 aa, Glycine max; identical to SEQ ID NO: 1441

SEQ ID NO: 8099 - DNA, 420 bp, Glycine max; identical to SEQ ID NO: 1442
  CDS (1)..(420)

SEQ ID NO: 8100 - protein, 139 aa, Glycine max; identical to SEQ ID NO: 1443

SEQ ID NO: 8101 - DNA, 423 bp, Glycine max; identical to SEQ ID NO: 1444
  CDS (1)..(423)

SEQ ID NO: 8102 - protein, 140 aa, Glycine max; identical to SEQ ID NO: 1445

SEQ ID NO: 8103 - DNA, 510 bp, Glycine max
  CDS (1)..(510)
atggcttcattttctatcacctcctcgcctcccacccttcacaaagccactatcaccgacccttcttcttcttcttcccacgccttccctcaccgttctcccttcgttttacgcatgccccaccaaccccatcgccctcaaactcctcttgttttgcccaagattcaatctttgcgcaacgaaactagagctattccagttaccaaagacctgtgggataattcaattctgaaaagtgaaatcccagtccttgttatattctatgcaaattggtgcggcccgtgcaggatggttcaccggataatagatgagatcgcaacagagtatgctgggaaactcaaatgttttatagtcaacacagacactgacatgcaaattgctgaggactatgaaattaaggctgtaccagtggttttgatgtttaaaaatggcaagaaatgtgattctgtaattggtaccatgccaaaggagttttatgtggctgctatagagggggtgctcaagccctaa

SEQ ID NO: 8104 - protein, 169 aa, Glycine max
MASFSITSSPPTLHKATITDPSSSSSHAFPHRSPFVLRMPHQPHRPQTPLVLPKIQSLRNETRAIPVTKDLWDNSILKSEIPVLVIFYANWCGPCRMVHRIIDEIATEYAGKLKCFIVNTDTDMQIAEDYEIKAVPVVLMFKNGKKCDSVIGTMPKEFYVAAIEGVLKP

SEQ ID NO: 8105 - DNA, 414 bp, Glycine max; identical to SEQ ID NO: 1448
  CDS (1)..(414)

SEQ ID NO: 8106 - protein, 137 aa, Glycine max; identical to SEQ ID NO: 1449

SEQ ID NO: 8107 - DNA, 528 bp, Glycine max
  CDS (1)..(528)
atggtcactctcttcgactccctcgccgtcgtgcgtctccccaccgccgccttctccccggctgccaccagccggacctccgttttgctcccgcactgcgccggcctcaggctcagacccgccgccgccacgcgcttagttgcgtcccccgctcgcagaatcgcttcacgcgccgcgcgcgtcgtatgtgaggctcaggataccgccgtcgaagtggctcctattactgatgcaaattggcaatcccttgtccttgaatctgaatctgctgttttggttgaattctgggcgccatggtgtggtccctgccgaatgattcaccctataatagatgaactggcaaagcaatatgctgggaagctcaagtgttacaaactcaacacggatgagagcccttcaaccgctactcggtatggaattcgaagcatccctactgttatgatcttcaagaatggtgagaagaaagatacagttattggtgctgtgcccaagtcaacattgaccacgagcatagaaaaattcgtatga

SEQ ID NO: 8108 - protein, 175 aa, Glycine max
MVTLFDSLAVVRLPTAAFSPAATSRTSVLLPHCAGLRLRPAAATRLVASPARRIASRAARVVCEAQDTAVEVAPITDANWQSLVLESESAVLVEFWAPWCGPCRMIHPIIDELAKQYAGKLKCYKLNTDESPSTATRYGIRSIPTVMIFKNGEKKDTVIGAVPKSTLTTSIEKFV

SEQ ID NO: 8109 - DNA, 546 bp, Glycine max
  CDS (1)..(546)
atggatgccatgacactgtcactcccgctccctccggttccggtctgtacagtgcccgcgtctgcatcaacctcgtcctctgtttctctcactcactcctggtcggccacggccaggcagaggctctcctctcacagaacaagacccattttccggaattattcctctgcggttccaaaacttacagtggtgacatgcggtgcggctgtgacggagatcaacgagacccaattcaaagacacggttctgaaggctaaccgtccggttcttgttgagttcgtcgctacttggtgcggtccttgccgtctcatctccccctctatggaatccctcgctaaggaatatgaagacagattaacggttgtaaagattgatcatgatgccaacccacggctaattgaagagtataaagtttatggactaccaacattaatactcttcaagaacgggcaagaagttccagaaagcagaagggaaggtgcaattacaaaagtgaaacttaaagagtacgtggatgctctattggaatcgatatcagtttcatag

SEQ ID NO: 8110 - protein, 181 aa, Glycine max
MDAMTLSLPLPPVPVCTVPASASTSSSVSLTHSWSATARQRLSSHRTRPIFRNYSSAVPKLTVVTCGAAVTEINETQFKDTVLKANRPVLVEFVATWCGPCRLISPSMESLAKEYEDRLTVVKIDHDANPRLIEEYKVYGLPTLILFKNGQEVPESRREGAITKVKLKEYVDALLESISVS

SEQ ID NO: 8111 - DNA, 417 bp, Glycine max; identical to SEQ ID NO: 1454
  CDS (1)..(417)

SEQ ID NO: 8112 - protein, 138 aa, Glycine max; identical to SEQ ID NO: 1455

SEQ ID NO: 8113 - DNA, 549 bp, Glycine max
  CDS (1)..(549)
atggccaccgtgcaactccaatccctaacccttgttcgctcctcagcacttccttccgccaccttctcccctccgatcgccgtctccggccgccgcaactccgccgcgctgccgcgctactccggcctccggctccgacccgccgctgagaccagtttcccgactcacgccagctcgagaaccgcttctcgcggcggaggtgtcaagtgcgaggcaggagacaccgctgttgaagttgctcccgttactgatgcaaattggcaatcacttgtgattgaatccgagtctcctgtactggttgaattctgggctccatggtgtggtccctgccgtatgatccacccgataattgacgagctggcaaaagaatatactggtaagctaaagtgctacaaactcaatactgatgagagcccttcaactgctactaagtacgggatacgaagtatcccaactgtcattattttcaagaatggtgagaagaaagatacagttataggagctgtgcccaagacaacattgacctcaagcattgaaaaattcttgtga

SEQ ID NO: 8114 - protein, 182 aa, Glycine max
MATVQLQSLTLVRSSALPSATFSPPIAVSGRRNSAALPRYSGLRLRPAAETSFPTHASSRTASRGGGVKCEAGDTAVEVAPVTDANWQSLVIESESPVLVEFWAPWCGPCRMIHPIIDELAKEYTGKLKCYKLNTDESPSTATKYGIRSIPTVIIFKNGEKKDTVIGAVPKTTLTSSIEKFL

SEQ ID NO: 8115 - DNA, 402 bp, Glycine max; identical to SEQ ID NO: 1428
  CDS (1)..(402)

SEQ ID NO: 8116 - protein, 133 aa, Glycine max; identical to SEQ ID NO: 1429

SEQ ID NO: 8117 - DNA, 420 bp, Glycine max; identical to SEQ ID NO: 1456
  CDS (1)..(420)

SEQ ID NO: 8118 - protein, 139 aa, Glycine max; identical to SEQ ID NO: 1457

SEQ ID NO: 8119 - DNA, 366 bp, Glycine max
  CDS (1)..(366)
atggccatggcatatgttgctagatcatcggagtcatctcaagtgcttaatttccattccactgctaaatggaatgctcactttgatgccttgaaacaaactaacaaactgatggtggttgatttcactgcttcatggtgtggaccttgcaaactcatggacccagttatccaagagtttgctacaaaatacagagatgtcgagtttgtgaagattgatgtggatgagttaatggaggtatctcaacattaccaagtacagggaatgccaactttcatgctgattaagaaaggcaacgtggctgataaagtggtgggagtaagaaaggaggagctacaaaggttgattgaacaacaccgaaaataa

SEQ ID NO: 8120 - protein, 121 aa, Glycine max
MAMAYVARSSESSQVLNFHSTAKWNAHFDALKQTNKLMVVDFTASWCGPCKLMDPVIQEFATKYRDVEFVKIDVDELMEVSQHYQVQGMPTFMLIKKGNVADKVVGVRKEELQRLIEQHRK

SEQ ID NO: 8121 - DNA, 405 bp, Glycine max; identical to SEQ ID NO: 1458
  CDS (1)..(405)

SEQ ID NO: 8122 - protein, 134 aa, Glycine max; identical to SEQ ID NO: 1459

SEQ ID NO: 8123 - DNA, 366 bp, Helianthus annuus
  CDS (1)..(366)
atggctgaagaaggaattgttgtcggttgccacaacgctgatcaatggaaagagcattttgataagcacaaggcttctcagaaattggttgttgtggatttcactgcttcatggtgcggtccttgccgtgtaattgcaccgatcttggctgattatgctaaaaagtttcctcatgtcgccttcttgaaggtcgatgtcgatgaagttgagagtgttgctcaggagtattcagtggaagcgatgccgacgttcttgttcttcaagaacggtgtgaaggtggacacagttgttggtgctaagaaggatgaacttcttgcctgcattgtgaagcatgctggagaggctgctgcaactgtatctgcttag

SEQ ID NO: 8124 - protein, 121 aa, Helianthus annuus
MAEEGIVVGCHNADQWKEHFDKHKASQKLVVVDFTASWCGPCRVIAPILADYAKKFPHVAFLKVDVDEVESVAQEYSVEAMPTFLFFKNGVKVDTVVGAKKDELLACIVKHAGEAAATVSA

SEQ ID NO: 8125 - DNA, 570 bp, Hordeum vulgare
  CDS (1)..(570)
atggcgttacgcctctccgtctcctcgccgcagagcacggcctcctcgccggccatctcctcatgccgccccgccgcctgcggccgattcctggcctgtgtggcggcttctcagaagaggagcctgatggtggtgtctggctctgacgcgagggtggtgactccgctgaagtcaggcagcttggagacggccacgacgggtgccgacgaggtggaaacacccgcagcggcggtggcggtgactgggcaggtcaccgaggtctgcaaagacaccttctggccaattgtcaaggcagcagggccgaagcttgtcgtcctcgatatgtacacccaatggtgcggcccttgcaaagttatggcaccgaaattccagcagatgtccgagaaggaccacgacgtcgtgttcctcaagctcgattgcaatcaagacaacaggccacttgcaaaggagctcggcataagggttgtaccaacattcaagattttcaaggatgggaaggtggctaaggaggtcactggtgcgaagattgatgaattagcgcgtgcgattgaggaagtgaagtcaagctga

SEQ ID NO: 8126 - protein, 189 aa, Hordeum vulgare
MALRLSVSSPQSTASSPAISSCRPAACGRFLACVAASQKRSLMVVSGSDARVVTPLKSGSLETATTGADEVETPAAAVAVTGQVTEVCKDTFWPIVKAAGPKLVVLDMYTQWCGPCKVMAPKFQQMSEKDHDVVFLKLDCNQDNRPLAKELGIRVVPTFKIFKDGKVAKEVTGAKIDELARAIEEVKSS

SEQ ID NO: 8127 - DNA, 396 bp, Hordeum vulgare; identical to SEQ ID NO: 1460
  CDS (1)..(396)

SEQ ID NO: 8128 - protein, 131 aa, Hordeum vulgare; identical to SEQ ID NO: 1461

SEQ ID NO: 8129 - DNA, 369 bp, Hordeum vulgare; identical to SEQ ID NO: 1462
  CDS (1)..(369)

SEQ ID NO: 8130 - protein, 122 aa, Hordeum vulgare; identical to SEQ ID NO: 1463

SEQ ID NO: 8131 - DNA, 372 bp, Linum usitatissimum; identical to SEQ ID NO: 1464
  CDS (1)..(372)

SEQ ID NO: 8132 - protein, 123 aa, Linum usitatissimum; identical to SEQ ID NO: 1465

SEQ ID NO: 8133 - DNA, 363 bp, Linum usitatissimum; identical to SEQ ID NO: 1466
  CDS (1)..(363)

SEQ ID NO: 8134 - protein, 120 aa, Linum usitatissimum; identical to SEQ ID NO: 1467

SEQ ID NO: 8135 - DNA, 357 bp, Zea mays; identical to SEQ ID NO: 1468
  CDS (1)..(357)

SEQ ID NO: 8136 - protein, 118 aa, Zea mays; identical to SEQ ID NO: 1469

SEQ ID NO: 8137 - DNA, 534 bp, Zea mays
  CDS (1)..(534)
atgtcgtccgcgccgagcaccacggcgtccaccatcgcagcctctatccacacgccgttctcctcgggtccccgcggggcccgccttccggccgcgctccgcctctcgctcgctcagctccggtcggccggatgccgcgcggcgccaggtcgcctcgctcgccctcgcgcgcgcgttcggtgcggcgcggcggccaggttcattgggcagggcgagttccccgcggaggtgctggagtcggagctgcccgtgctcgtggacttcgtcgccgactggtgcgggccgtgccgcctcatcgcgcccgtcgtcgattgggcctccgaggaatatgctgggcgattaaaaattgtcaagattgatcatgatgccaatccacagctgattgaagagtacaaggtctatggtctcccgactttgattctcttcaagaatggacaagaggtaccagacagccgacgagaaggggcaatgacaaaagacaagttcaagcaatacctggaacctctcttgactacaattacaacagccgcttaa

SEQ ID NO: 8138 - protein, 177 aa, Zea mays
MSSAPSTTASTIAASIHTPFSSGPRGARLPAALRLSLAQLRSAGCRAAPGRLARPRARVRCGAAARFIGQGEFPAEVLESELPVLVDFVADWCGPCRLIAPVVDWASEEYAGRLKIVKIDHDANPQLIEEYKVYGLPTLILFKNGQEVPDSRREGAMTKDKFKQYLEPLLTTITTAA

SEQ ID NO: 8139 - DNA, 549 bp, Zea mays
  CDS (1)..(549)
atggccctgcgcctaccaatctcatcgtcccacgggctggcctccacgccggcgccaatctccacgacgacgtgccggccggccgtcttggcgacggccgcggcccagaagaggagcctgctgctggcgacggcctccgagacgaggggagtcgcgccggtgaggtccagcgggatcgagacgagcacggtgggtctgggatgtgaggccgtcaccgggcaggtcacggaggtcaacaaggacaccttctggcccatcgtcgaggccgccggcgacaaggtcgtcgtcctcgacatgtacaccgaatggtgcgggccttgcaaagtgatggctcccaagttccaggagatgtccgagaagaacctggacgtcgtgttcctcaagctggactgcaaccaggacaacaagcctctcgcgaaggagctgggcataaaggttgtgccgacgttcaagatcctcaagggcgggaaggtcgtgaaggaggtcaccggcgccaagatcgacgagctagcggaagccatcgagatagccaacaagaagtcaggctga

SEQ ID NO: 8140 - protein, 182 aa, Zea mays
MALRLPISSSHGLASTPAPISTTTCRPAVLATAAAQKRSLLLATASETRGVAPVRSSGIETSTVGLGCEAVTGQVTEVNKDTFWPIVEAAGDKVVVLDMYTEWCGPCKVMAPKFQEMSEKNLDVVFLKLDCNQDNKPLAKELGIKVVPTFKILKGGKVVKEVTGAKIDELAEAIEIANKKSG

SEQ ID NO: 8141 - DNA, 396 bp, Zea mays; identical to SEQ ID NO: 1470
  CDS (1)..(396)

SEQ ID NO: 8142 - protein, 131 aa, Zea mays; identical to SEQ ID NO: 1471

SEQ ID NO: 8143 - DNA, 405 bp, Zea mays; identical to SEQ ID NO: 1472
  CDS (1)..(405)

SEQ ID NO: 8144 - protein, 134 aa, Zea mays; identical to SEQ ID NO: 1473

SEQ ID NO: 8145 - DNA, 363 bp, Zea mays
  CDS (1)..(363)
atggcgtccgaggagggagtcgtgatcgcctgccacaccaaggccgacttcgacgcccacatggccaaggccaaggaggccggcaagctggtgatcattgacttcacggcctcctggtgcggcccctgccgcttcatcgcgccactgttcgtcgagcacgccaagaagttcacccaggctgtgttcctgaaggtggacgtggacgagctgaaggaagttgccgcggcctacgatgtcgaggcgatgccgaccttccacttcgtcaagaacggggtgacggtggagaccgtcgtcggtgccaggaaggagaacctcctggcccagatcgagaagcactgcgccgcggccgtgcctgctgcgtag

SEQ ID NO: 8146 - protein, 120 aa, Zea mays
MASEEGVVIACHTKADFDAHMAKAKEAGKLVIIDFTASWCGPCRFIAPLFVEHAKKFTQAVFLKVDVDELKEVAAAYDVEAMPTFHFVKNGVTVETVVGARKENLLAQIEKHCAAAVPAA

SEQ ID NO: 8147 - DNA, 570 bp, Triticum aestivum
  CDS (1)..(570)
atggcgttacgcctctccgtctcctcgccgcagagcacggcctcctcgccggccatctcctcatgccgccccgccgcctgcggccgcttcctggcctgcgtggcggcttctcagaagaggagcctgatggtggtgtctggctctgacgggaggggagtggctccggtgaagtcgggcggcttggagacggccacgacgggagccgacgaggtggaagcgcccacagcggcggtggcggtgaccgggcaggtcacggaggtctgcaaggacaccttctggccaattgtcaaggcagcaggggagaagcccgtcgtcctcgacatgtacacccaatggtgcggcccttgcaaagttatggcaccaaaattccaggagatgtctgagaaggaccacgacgtcgtattcctcaagctcgattgcaatcaagacaacaggcctcttgcaaaggagcttggcataagggttgtaccaacattcaagattttcaaggatgggaaggttgcaaaggaggtcactggtgcgaagattgatgaattagcgcgtgcgattgaggaagtgaagtcaagctga

SEQ ID NO: 8148 - protein, 189 aa, Triticum aestivum
MALRLSVSSPQSTASSPAISSCRPAACGRFLACVAASQKRSLMVVSGSDGRGVAPVKSGGLETATTGADEVEAPTAAVAVTGQVTEVCKDTFWPIVKAAGEKPVVLDMYTQWCGPCKVMAPKFQEMSEKDHDVVFLKLDCNQDNRPLAKELGIRVVPTFKIFKDGKVAKEVTGAKIDELARAIEEVKSS

SEQ ID NO: 8149 - DNA, 381 bp, Triticum aestivum; identical to SEQ ID NO: 1474
  CDS (1)..(381)

SEQ ID NO: 8150 - protein, 126 aa, Triticum aestivum; identical to SEQ ID NO: 1475

SEQ ID NO: 8151 - DNA, 396 bp, Triticum aestivum
  CDS (1)..(396)
atggggggctgtgtgggcaagggtcgtagcattgtggaagaaaagcttgatttcaaaggtggaaatgtgcatgtcataacaaccaaagaggactgggaccagaagattgaagaagcaaacaaggatgggaaaattgttgtagcaaacttcagtgcttcgtggtgtgggccatgccgtgtcattgcacctgtttatgccgagatgtccaagacttatcctcaactcatgttcttgacaattgatgttgatgacctaatggatttcagctcaacatgggacatccgtgcaaccccgacgttcttcttcctcaaaaacggccagcagatcgacaagctcgtcggcgccaacaaacctgagctcgagaagaaagtacaagctcttggtgatggcagttga

SEQ ID NO: 8152 - protein, 131 aa, Triticum aestivum; identical to SEQ ID NO: 1281

SEQ ID NO: 8153 - DNA, 297 bp, Triticum aestivum
  CDS (1)..(297)
atgcagatcgaggaggccaacgccgccaagaagctggtggtggttgacttcactgcatcatggtgtggaccatgccgcatcatggctccagttttcgctgatctcgccaagaagttcccaaatgctgttttcctcaaggtcgatgtcgatgaactgaagcccattgcggagcaattcagcgttgaggccatgccaaccttcctgttcattaaggaaggagatgtcaaggacagggttgtgggagctatcaaggaggaactgacgaacaaggttgggctacacgcggcggcccagtaa

SEQ ID NO: 8154 - protein, 98 aa, Triticum aestivum
MQIEEANAAKKLVVVDFTASWCGPCRIMAPVFADLAKKFPNAVFLKVDVDELKPIAEQFSVEAMPTFLFIKEGDVKDRVVGAIKEELTNKVGLHAAAQ

SEQ ID NO: 8155 - DNA, 357 bp, Triticum aestivum; identical to SEQ ID NO: 1476
  CDS (1)..(357)

SEQ ID NO: 8156 - protein, 118 aa, Triticum aestivum; identical to SEQ ID NO: 1477

SEQ ID NO: 8157 - DNA, 396 bp, Triticum aestivum; identical to SEQ ID NO: 1478
  CDS (1)..(396)

SEQ ID NO: 8158 - protein, 131 aa, Triticum aestivum; identical to SEQ ID NO: 1479

SEQ ID NO: 8159 - DNA, 381 bp, Triticum aestivum; identical to SEQ ID NO: 1480
  CDS (1)..(381)

SEQ ID NO: 8160 - protein, 126 aa, Triticum aestivum; identical to SEQ ID NO: 1481

SEQ ID NO: 8161 - DNA, 357 bp, Triticum aestivum; identical to SEQ ID NO: 1482
  CDS (1)..(357)

SEQ ID NO: 8162 - protein, 118 aa, Triticum aestivum; identical to SEQ ID NO: 1483

SEQ ID NO: 8163 - DNA, 528 bp, Glycine max
  CDS (1)..(528)
atggtcactctcttcgactccctcgccgtcgtgcgtctccccaccgccgccttctccccggctgccaccagccggacctccgttttgctcccgcactgcgccggcctcaggctcagacccgccgccgccacgcgcttagttgcgtcccccgctcgcagaatcgcttcacgcgccgcgcgcgtcgtatgtgaggctcaggataccgccgtcgaagtggctcctattactgatgcaaattggcaatcccttgtccttgaatctgaatctgctgttttggttgaattctgggcgccatggtgtggtccctgccgaatgattcaccctataatagatgaactggcaaagcaatatgctgggaagctcaagtgttacaaactcaacacggatgagagcccttcaaccgctactcggtatggaattcgaagcatccctactgttatgatcttcaagaatggtgagaagaaagatacagttattggtgctgtgcccaagtcaacattgactgcgagcatagaaaaattcgtatga

SEQ ID NO: 8164 - protein, 175 aa, Glycine max
MVTLFDSLAVVRLPTAAFSPAATSRTSVLLPHCAGLRLRPAAATRLVASPARRIASRAARVVCEAQDTAVEVAPITDANWQSLVLESESAVLVEFWAPWCGPCRMIHPIIDELAKQYAGKLKCYKLNTDESPSTATRYGIRSIPTVMIFKNGEKKDTVIGAVPKSTLTASIEKFV

SEQ ID NO: 8165 - DNA, 549 bp, Zea mays
  CDS (1)..(549)
atggccgccggcctcgccttccccgtcgcctcctttcaactcgcctgcgtctcctcacatccccaccccgggcaccgcatctgctgcgcgatcccgtcgtcgtcctcgcgccgcaccgtcaaatcctcgccgctccgcgcgactaccgtcctctccagggaacgacggggcacgggccgtggcgcgtccgtagtgtgcgccgtccaaggccaggacacgaccatccaagtcccagatgtgacaaagtcaacatggcaatcactcgtgatcgagagcgagcttcctgtcctggttgagttctcggcggcatggtgcgggccatgcaagatgatagaaccagttgttggcaagctctcgaaggactacgaggggaagctgaaatgctacaagctaaacacagatgagagcccggacatcgcaagccagtacggggtccggagcatccccaccacgatgatcttcaaggatggcgagaagaaggattcggttatcggggccgtgccagagagcacactggtcacatgcatcgagaaatttgtcgagaggtag

SEQ ID NO: 8166 - protein, 182 aa, Zea mays
MAAGLAFPVASFQLACVSSHPHPGHRICCAIPSSSSRRTVKSSPLRATTVLSRERRGTGRGASVVCAVQGQDTTIQVPDVTKSTWQSLVIESELPVLVEFSAAWCGPCKMIEPVVGKLSKDYEGKLKCYKLNTDESPDIASQYGVRSIPTTMIFKDGEKKDSVIGAVPESTLVTCIEKFVER

SEQ ID NO: 8167 - DNA, 402 bp, Zea mays; identical to SEQ ID NO: 1298
  CDS (1)..(402)

SEQ ID NO: 8168 - protein, 133 aa, Zea mays; identical to SEQ ID NO: 1299

SEQ ID NO: 8169 - DNA, 534 bp, Zea mays
  CDS (1)..(534)
atgtcgtccgcgccgagcaccacggcgtccaccatcgcagcctctatccacacgccgttctcctcgggtccccgcggggcccgccttccggccgcgctccgcctctcgctcgctcagctccggtcggccggatgccgcgcggcgccaggtcgcctcgctcgccctcgcgcgcgcgttcggtgcggcgcggcggccaggttcattgggcagggcgagttccccgcggaggtgctggagtcggagctgcccgtgctcgtggacttcgtcgccgactggtgcgggccgtgccgcctcatcgcgcccgtcgtcgattgggcctccgaggaatatgctgggcgattaaaaattgtcaagattgatcatgatgccaatccacagctgattgaagagtacaaggtttatggtctcccgactttgattctcttcaaggatggccaagaggtgccaggcagccgacgagaaggggcaatgataaaagacaagttcaaggaatacctggaacctctgttgactacaattacaacagccgcttaa

SEQ ID NO: 8170 - protein, 177 aa, Zea mays
MSSAPSTTASTIAASIHTPFSSGPRGARLPAALRLSLAQLRSAGCRAAPGRLARPRARVRCGAAARFIGQGEFPAEVLESELPVLVDFVADWCGPCRLIAPVVDWASEEYAGRLKIVKIDHDANPQLIEEYKVYGLPTLILFKDGQEVPGSRREGAMIKDKFKEYLEPLLTTITTAA

SEQ ID NO: 8171 - DNA, 366 bp, Zea mays
  CDS (1)..(366)
atggcgtccgaggaggagggagtcgtgatcgcctgccacaccaaggccgagttcgacgcccacatggccaaggccaaggaggccggcaagctggtgatcattgacttcacggcctcctggtgcggcccctgccgcttcatcgcgccactgttcgtcgagcacgccaagaagttcacccaggctgtgttcctgaaggtggacgtggacgagctgaaggaagttgccgcggcctacgatgtcgaggcgatgccgaccttccacttcgtcaagaacggggtgacggtggagaccgtcgtcggtgccaggaaggagaacctcctggcccagatcgagaagcactgcgccgcggccgtgcctgctgcgtag

SEQ ID NO: 8172 - protein, 121 aa, Zea mays
MASEEEGVVIACHTKAEFDAHMAKAKEAGKLVIIDFTASWCGPCRFIAPLFVEHAKKFTQAVFLKVDVDELKEVAAAYDVEAMPTFHFVKNGVTVETVVGARKENLLAQIEKHCAAAVPAA

SEQ ID NO: 8173 - DNA, 522 bp, Zea mays
  CDS (1)..(522)
atggccttccgcctcgccgtcgccgtctccgtcgcagcgcctgcgtcgtggccttccccggtcgccaccgtcgccccgccccgcctcgccctccgccgaggcctcccgccgacgtggcgcgcagttcgagccctcccgcgttcccgtggcgccgtcgtggtgtgccaggcccagggcggccaggacactgcaatccaagttcctgatgtgagcaaatccacatggcaatcacttgtggtggagagcgagcttcccgtccttgttgagttctgggcttcatggtgcggaccgtgtaagatgatagaccccatcgttggcaagctctcaaaggagtacgaaggaaagctgaaatgttacaagctaaacaccgacgagaaccctgacatcgcaacccaattcggcatccggagcatccccaccatgatgatattcaagaacggtgagaagaaggactcggtgattggagccgtgccagaaagcaccctcgtcacctgcattgacaagtatgttggtgggaggtga

SEQ ID NO: 8174 - protein, 173 aa, Zea mays
MAFRLAVAVSVAAPASWPSPVATVAPPRLALRRGLPPTWRAVRALPRSRGAVVVCQAQGGQDTAIQVPDVSKSTWQSLVVESELPVLVEFWASWCGPCKMIDPIVGKLSKEYEGKLKCYKLNTDENPDIATQFGIRSIPTMMIFKNGEKKDSVIGAVPESTLVTCIDKYVGGR

SEQ ID NO: 8175 - DNA, 570 bp, Zea mays
  CDS (1)..(570)
atggcgctcctcgcgccgagcccgcgcgcgctccgcgtgcgggagaccgcggcggcggcgctcccgcactcatcggcgaccgctgcatgctcgaccgtcggcggcggggcagccaggcgggcgctgtggctgtgggacaacggcggcgggaccgggacggggaggaggaaggaccaccgggagagagtccggccggaggcgtactgctgggacgtgtccaggccggtggagatggaggagatcgacagcatcgagaagctcgatgatgcgctcaggtggtccgtcgagaacaaccagcccgtcgtcatcgactggatggcaggttggtgtcggaaatgcatctacctgatgcccagaatggagaagatggcaggagaatatcctgaagtgaggttttacttcatcgatgtcaataaagttccacaggcggtggtgaaaagaggaaatgtaactagaatgcccactattcagctatggaaggatggagagtggaaagcggaagtaataggaggccacaaagcttgtcttgtgatggatgaggttagagaaatgatcgagaataacaagtga

SEQ ID NO: 8176 - protein, 189 aa, Zea mays
MALLAPSPRALRVRETAAAALPHSSATAACSTVGGGAARRALWLWDNGGGTGTGRRKDHRERVRPEAYCWDVSRPVEMEEIDSIEKLDDALRWSVENNQPVVIDWMAGWCRKCIYLMPRMEKMAGEYPEVRFYFIDVNKVPQAVVKRGNVTRMPTIQLWKDGEWKAEVIGGHKACLVMDEVREMIENNK

SEQ ID NO: 8177 - DNA, 567 bp, Zea mays
  CDS (1)..(567)
atggcgctcctcgcgccgagcccgcgcgcgctctgcgtgcgggaggccgcggcggcgtcgccgcacccgcactcgttggcgaccgccgcctgctcgaccgttggcggcggggtggctgggcgggcgctgtggctgtggaacggcggcggaacggggaggaggaggagggagcgccgggagagggtccgggcggaggcatacttctgggacgtgtccaagccggtggagatggaggagatcgacagcatggagaagctcgacgacgcgctcaggtggtccgtcgagaacaaccagcccatcatcatcgactggatggcaagttggtgtcggaaatgcatatacctggtgcccagaatggagaagatagcaggagaatatcctggagtcaggttttacttcgtcgatgtcaacaaagttccacaggcggtggtgaaaagaggaaatgtaactaaaatgcccactattcagctctggaaggacggagagtggaaagcagaagtaataggtggtcacaaagcttggcttgtgatggatgaggtcagagaaatgatccagaagaacaagtga

SEQ ID NO: 8178 - protein, 188 aa, Zea mays
MALLAPSPRALCVREAAAASPHPHSLATAACSTVGGGVAGRALWLWNGGGTGRRRRERRERVRAEAYFWDVSKPVEMEEIDSMEKLDDALRWSVENNQPIIIDWMASWCRKCIYLVPRMEKIAGEYPGVRFYFVDVNKVPQAVVKRGNVTKMPTIQLWKDGEWKAEVIGGHKAWLVMDEVREMIQKNK

SEQ ID NO: 8179 - DNA, 567 bp, Zea mays
  CDS (1)..(567)
atggccgccgtcgccgctctttcctgccccgcgcctccgcgtgtgttccgctgcgccaagacgctgcctgctccctccgccgccacatccagccgcggaagggtaggctacggctcctcctacgcccgccggtggcagtgccgccgctggacccaccggccggacgctacgacgacgcggatcaggcgggcaacgccgcgccgcacggcggtggtgagggtgaactgcgcctactctccccgcgctgaaacaatcactgcatgctcttggaatgaatatgtgatctgcagtgatgtacctgtgcttattgagttttgggcctcctggtgtggaccttgcagaatggtcacacggattgtcgatgagatagcacaagaatattctgggagaataaaatgctacaagcttgacactgatgattacccacaggttgctacagcttacagcatcgagaggattccaactgttttactctttaaggatggagagaaaatacatagtattaccgggacactgccaaaggctgtttatgtgaaagccattgagaaatctatttcagaacaatga

SEQ ID NO: 8180 - protein, 188 aa, Zea mays
MAAVAALSCPAPPRVFRCAKTLPAPSAATSSRGRVGYGSSYARRWQCRRWTHRPDATTTRIRRATPRRTAVVRVNCAYSPRAETITACSWNEYVICSDVPVLIEFWASWCGPCRMVTRIVDEIAQEYSGRIKCYKLDTDDYPQVATAYSIERIPTVLLFKDGEKIHSITGTLPKAVYVKAIEKSISEQ

SEQ ID NO: 8181 - DNA, 606 bp, Zea mays
  CDS (1)..(606)
atggcactgcggctacccatctcctcgacccacgggctggcctcctcgccagcgcccatctcctccacgacgacgtgccggccggccgccgccagtgggagcttgatcccgccagctgccctgatcgcagttgccatccgctgggcgtcggcgtcggcgtcccaaaagaggggcctgctgctgacgacggcgaggggcggcggagtcctcgcgccggtgaggtcgagcgggatcgagacgacgacgacctcggtgggagctgaggccgtcaccgggcaggtcacggaggtcaacaaggacaccttctggcccatcgtcgaggccgccggcgacaaggtcgtcgtcctcgacatgtacaccgaatggtgcgggccttgcaaagtgatggctcccaagttccaggagatgtccgagaagaacctggacgtcgtgttcctcaagctggactgcaaccaggacaacaagcctctcgcgaaggagctgggcataaaggttgtgccgacgttcaagatcctcaagggcgggaaggtcgtgaaggaggtcaccggcgccaagatcgacgagctagcggaagccatcgagatagccaacaagaagtcaggctga

SEQ ID NO: 8182 - protein, 201 aa, Zea mays
MALRLPISSTHGLASSPAPISSTTTCRPAAASGSLIPPAALIAVAIRWASASASQKRGLLLTTARGGGVLAPVRSSGIETTTTSVGAEAVTGQVTEVNKDTFWPIVEAAGDKVVVLDMYTEWCGPCKVMAPKFQEMSEKNLDVVFLKLDCNQDNKPLAKELGIKVVPTFKILKGGKVVKEVTGAKIDELAEAIEIANKKSG

SEQ ID NO: 8183 - DNA, 369 bp, Zea mays; identical to SEQ ID NO: 1496
  CDS (1)..(369)

SEQ ID NO: 8184 - protein, 122 aa, Zea mays; identical to SEQ ID NO: 1497

SEQ ID NO: 8185 - DNA, 399 bp, Zea mays; identical to SEQ ID NO: 1490
  CDS (1)..(399)

SEQ ID NO: 8186 - protein, 132 aa, Zea mays; identical to SEQ ID NO: 1491

SEQ ID NO: 8187 - DNA, 522 bp, Zea mays
  CDS (1)..(522)
atggcctcccgcctcgccgtcgccgtcgccgtcgccgcgcccgcgtcgtctccttccccggtcgccaccgtcgccccgccccgcgtcgccctccgccgaggcctcccgccgacgtggcacgctctccgcgccctccctcgatcccgtggcgcagccgtcgtgtgccaggcccagggcggccaggacaccgccatccaagttcctgatgtgagcaaatccacatggcaatcacttgtggtggagagcgagcttcccgtcctcgttcagttctgggcctcatggtgtggaccgtgtaagatgatagaccccatcgttggcaagctctcgaaggagtacgaaggaaagctgaagtgttacaagctaaacactgacgagaaccctgacatcgcgacccaattcggcattcggagcatccccaccatgatgatattcaagaatggtgagaagaaggacgcggtgattggagccgtgccagagagcaccctggtcacctgcatcgacaagtacgttggtgggaggtga

SEQ ID NO: 8188 - protein, 173 aa, Zea mays
MASRLAVAVAVAAPASSPSPVATVAPPRVALRRGLPPTWHALRALPRSRGAAVVCQAQGGQDTAIQVPDVSKSTWQSLVVESELPVLVQFWASWCGPCKMIDPIVGKLSKEYEGKLKCYKLNTDENPDIATQFGIRSIPTMMIFKNGEKKDAVIGAVPESTLVTCIDKYVGGR

SEQ ID NO: 8189 - DNA, 570 bp, Zea mays
  CDS (1)..(570)
atggcgctcctcgcgccgagcccgcgcgcgctccgcgtgcgggagaccgcggcggcggcgctcccgcactcatcggcgaccgctgcatgctcgaccgtcggcggcggggcggccaggcgggcgctgtggctgtgggacaacggcggcgggaccgggacggggaggaggaaggagcaccgggagagagtccggccggaggcgtactgctgggacgtgtccaggccggtggagatggaggagatcgacagcatcgagaagctcgatgatgcgctcaggtggtccgtcgagaacaaccagcccgtcgtcatcgactggatggcaggttggtgtcggaaatgcatctacctgatgcccagaatggagaagatggcaggagaatatcctgaagtgaggttttacttcatcgatgtcaataaagttccacagggggtggtgaaaagaggaaatgtaactagaatgcccactattcagctatggaaggatggagagtggaaagcggaagtaataggaggccacaaagcttgtcttgtgatggatgaggttagagaaatgatcgagaataacaagtga

SEQ ID NO: 8190 - protein, 189 aa, Zea mays
MALLAPSPRALRVRETAAAALPHSSATAACSTVGGGAARRALWLWDNGGGTGTGRRKEHRERVRPEAYCWDVSRPVEMEEIDSIEKLDDALRWSVENNQPVVIDWMAGWCRKCIYLMPRMEKMAGEYPEVRFYFIDVNKVPQGVVKRGNVTRMPTIQLWKDGEWKAEVIGGHKACLVMDEVREMIENNK

SEQ ID NO: 8191 - DNA, 432 bp, Zea mays; identical to SEQ ID NO: 1390
  CDS (1)..(432)

SEQ ID NO: 8192 - protein, 143 aa, Zea mays; identical to SEQ ID NO: 1391

SEQ ID NO: 8193 - DNA, 432 bp, Zea mays; identical to SEQ ID NO: 1486
  CDS (1)..(432)

SEQ ID NO: 8194 - protein, 143 aa, Zea mays; identical to SEQ ID NO: 1487

SEQ ID NO: 8195 - DNA, 606 bp, Zea mays
  CDS (1)..(606)
atggcactgcggctacccatctcctcgacccacgggctggcctcctcgccagcgcccatctcctccacgacgacgtgccggccggccgccgccagtgggagcttgatcccgccagctgccctggtcgcagttgccatccgctgggcgtcggcgtcggcgtcccaaaagaggggcctgctgctgacgacggcgaggggcggcggagtcctcgcgccggtgaggtcgagcgggatcgagacgacgacgacctcggtgggagctgaggccgtcaccgggcaggtcacggaggtcaacaaggacaccttctggcccatcgtcgaggccgccggcgacaaggtcgtcgtcctcgacatgtacaccgaatggtgcgggccttgcaaagttatggctcccaagttccaggagatgtccgagaagaacctggacgtcgtgttcctcaagctggactgcaaccaggacaacaagcctctcgcgaaggagctgggcataaaggttgtgccgacgttcaagatcctcaagggcgggaaggtcgtgaaggaggtcaccggcgccaagatcgacgagctagcggaagccatcgagatagccaacaagaagtcaggctga

SEQ ID NO: 8196 - protein, 201 aa, Zea mays
MALRLPISSTHGLASSPAPISSTTTCRPAAASGSLIPPAALVAVAIRWASASASQKRGLLLTTARGGGVLAPVRSSGIETTTTSVGAEAVTGQVTEVNKDTFWPIVEAAGDKVVVLDMYTEWCGPCKVMAPKFQEMSEKNLDVVFLKLDCNQDNKPLAKELGIKVVPTFKILKGGKVVKEVTGAKIDELAEAIEIANKKSG

SEQ ID NO: 8197 - DNA, 567 bp, Zea mays
  CDS (1)..(567)
atggccgccgtcgccgctctttcctgccccgcgcctccgcgtgtgttccgctgcgccaagacgctgcctgctccctccgccgccacatccagccgcggaagggtcggctacggctcctcctacgcccgccggtggcagtgccgccgctggacccaccggccggacgctacgacgacgcggatcaggcgggcaacgccgcgccgcacggcggtggtgagggtgaactgcgcctactctccccgcgctgaaacaatcactgcatgctcttggaatgaatatgtgatttgcagtgatgtacctgtgcttattgagttttgggcctcctggtgtggaccttgcagaatggtcacacggattgtcgatgagatagcacaagaatatgttgggagaataaaatgctataagcttgacaccgatgattacccacaggttgctacagcttacagcatcgagaggattccaactgttttactctttaaggatggagagaaaatacatagtattaccgggacactgccaaaggctgtttatgtgaaagccattgagaaatctatttcagaacaatga

SEQ ID NO: 8198 - protein, 188 aa, Zea mays
MAAVAALSCPAPPRVFRCAKTLPAPSAATSSRGRVGYGSSYARRWQCRRWTHRPDATTTRIRRATPRRTAVVRVNCAYSPRAETITACSWNEYVICSDVPVLIEFWASWCGPCRMVTRIVDEIAQEYVGRIKCYKLDTDDYPQVATAYSIERIPTVLLFKDGEKIHSITGTLPKAVYVKAIEKSISEQ

SEQ ID NO: 8199 - DNA, 504 bp, Zea mays
  CDS (1)..(504)
atggcggccttcgctacgggcagcaccacagcgcgcgcgacgctggcatcgccgacttcgtgccagccggccgcgcgccgggcgccggcccgatggatgccgctgcgctgctcgccgccggccctgggcctcaggggaggagcgcgttctcggcggagcgccacgctacgggtggaagctaagaagcaaactttttcttcatttgatgagttgctggagaagtctgagaagccattgttagttgacttctatgcaacttggtgtggtccatgccaatacatggttcccatacttcaagaagtgagtgagaagttaggcgacaaaattcaagttgtgaaaattgatactgagaagtacactagcattgcaagtcgttacagaattgaagcattgccaacttttatcatattcaaggatgggaaaccttgttatcgctttgagggagcattacctgttgaccagatgatcgaacagattgaaaatgctttggcagtcacaaagtag

SEQ ID NO: 8200 - protein, 167 aa, Zea mays
MAAFATGSTTARATLASPTSCQPAARRAPARWMPLRCSPPALGLRGGARSRRSATLRVEAKKQTFSSFDELLEKSEKPLLVDFYATWCGPCQYMVPILQEVSEKLGDKIQVVKIDTEKYTSIASRYRIEALPTFIIFKDGKPCYRFEGALPVDQMIEQIENALAVTK

SEQ ID NO: 8201 - DNA, 567 bp, Zea mays
  CDS (1)..(567)
atggccgccgtcgccgctctttcctgccccgcgcctccgcgtgggctccgctgcgccaagacgctgcctgctccctccgccgccacatccagtcgcggaagggtaggctacggctcctcctacgcccgtcggtggcagtgccgccgctgggcccaccggccggacgctgcgacgacgcggatcaggcgggcaacgccgcgccgcacggcggtggtgagggtgaactgcgcctactctccccgcgctgaaacaatcactgcatgctcttggaatgaatatgtgatctgcagtgatgtacctgtgcttattgagttttgggcctcctggtgtggaccttgcagaatggtcacacggattgtcgatgagatagcacaagaatattctgggagaataaaatgctacaagcttgacactgatgattacccacaggttgctacagcttacagcatcgagaggattccaactgttttactctttaaggatggagagaaaatacatagtattaccgggacactgccaaaggctgtttatgtgaaagccattgagaaatctatttcagaacaatga

SEQ ID NO: 8202 - protein, 188 aa, Zea mays
MAAVAALSCPAPPRGLRCAKTLPAPSAATSSRGRVGYGSSYARRWQCRRWAHRPDAATTRIRRATPRRTAVVRVNCAYSPRAETITACSWNEYVICSDVPVLIEFWASWCGPCRMVTRIVDEIAQEYSGRIKCYKLDTDDYPQVATAYSIERIPTVLLFKDGEKIHSITGTLPKAVYVKAIEKSISEQ

SEQ ID NO: 8203 - DNA, 384 bp, Zea mays; identical to SEQ ID NO: 1488
  CDS (1)..(384)

SEQ ID NO: 8204 - protein, 127 aa, Zea mays; identical to SEQ ID NO: 1489

SEQ ID NO: 8205 - DNA, 504 bp, Zea mays
  CDS (1)..(504)
atggcggccttcgctacgggcagcaccacagcgcgcgcgacgctggcatcgccgacttcgtgccagccggccgcgcgccgggcgccggcccgatggatgccgctgcgctgctcgccgccggcccggggcctcaggggaggagcgcgttctcggcggagcgccacgctacgggtggaagctaagaagcaaactttttcttcatttgatgagttgctggagaagtctgagaagccattgttagttgacttctatgcaacttggtgtggtccatgccaatacatggttcccatacttcaagaagtgagtgagaagttaggcgacaaaattcaagttgtgaaaattgatactgagaagtacactagcattgcaagtcgttacagaattgaagcattgccaacttttatcatattcaaggatgggaaaccttgttatcgctttgagggagcattacctgttgaccagatgatcgaacagattgaaaatgctttggcagtcacaaagtag

SEQ ID NO: 8206 - protein, 167 aa, Zea mays
MAAFATGSTTARATLASPTSCQPAARRAPARWMPLRCSPPARGLRGGARSRRSATLRVEAKKQTFSSFDELLEKSEKPLLVDFYATWCGPCQYMVPILQEVSEKLGDKIQVVKIDTEKYTSIASRYRIEALPTFIIFKDGKPCYRFEGALPVDQMIEQIENALAVTK

SEQ ID NO: 8207 - DNA, 363 bp, Zea mays
  CDS (1)..(363)
atggcgtccgaggagggagtcgtgatcgcctgccacaccaaggccgaatttgacgcccacatggccaaggccaaggaggccggcaagctggtgatcattgacttcacggcctcctggtgcggcccctgccgcttcatcgcgccactgttcgtcgagcacgccaagaagttcacccaggctgtgttcctgaaggtggacgtggacgagctgaaggaagttgccgcggcctacgatgtcgaggcgatgccgaccttccacttcgtcaagaacggggtgacggtggagaccgtcgtcggtgccaggaaggagaacctcctggcccagatcgagaagcactgcgccgcggccgtgcctgctgcgtag

SEQ ID NO: 8208 - protein, 120 aa, Zea mays
MASEEGVVIACHTKAEFDAHMAKAKEAGKLVIIDFTASWCGPCRFIAPLFVEHAKKFTQAVFLKVDVDELKEVAAAYDVEAMPTFHFVKNGVTVETVVGARKENLLAQIEKHCAAAVPAA

SEQ ID NO: 8209 - DNA, 402 bp, Zea mays; identical to SEQ ID NO: 1492
  CDS (1)..(402)

SEQ ID NO: 8210 - protein, 133 aa, Zea mays; identical to SEQ ID NO: 1493

SEQ ID NO: 8211 - DNA, 543 bp, Zea mays
  CDS (1)..(543)
atggccctgcgcctaccaatctcatcgtcccacgggctggcctccacgccggcgccaatctccacgacgacgtgccggccggccgtcttggcgacggccgcggcccagaagaggagcctgctgctggcgacggcctccgagacgaggggagtcgcgccggtgaggtccagcgggatcgagacgagcacggtgggtctgggatgtgaggccgtcaccgggcaggtcacggaggtcaacaaggacaccttctggcccatcgtcgaggccgccggcgacaaggtcgtcgtcctcgacatgtacaccgaatggtgcgggccttgcaaagtgatggctccgaaattccaggagatgtctgagaagaacctggatgttgtgttcctgaagctcgactgcaaccaggacaacaagccgcttgcgaaggagctgggcataaaggttgtgccaacgttcaagatcctcaagggtgggaaggtcgtgaaggaggtgaccggcgccaagatcgacgagctagcgcaagccatcgacacagtcaagtcagactga

SEQ ID NO: 8212 - protein, 180 aa, Zea mays
MALRLPISSSHGLASTPAPISTTTCRPAVLATAAAQKRSLLLATASETRGVAPVRSSGIETSTVGLGCEAVTGQVTEVNKDTFWPIVEAAGDKVVVLDMYTEWCGPCKVMAPKFQEMSEKNLDVVFLKLDCNQDNKPLAKELGIKVVPTFKILKGGKVVKEVTGAKIDELAQAIDTVKSD

SEQ ID NO: 8213 - DNA, 381 bp, Zea mays
  CDS (1)..(381)
atggcggccgaggagggtgccgtgatcgcgtgccacaccaaggacgagttcgacgcccgcatggccaaggccaaggagcagggcaagctggtggtcatcgacttcatggccccctggtgcagtgggtgccagatgatggccccggtgtacgcggactgcgccagcaagtacccttccgcggtcttcctcgaggtcgacgtggacgaactgctggaagtcgcgaagatctacggcgtccatgtgatgccgaccttctgcttcatcaggaacggcgagacgctcgagagctttgctaccgtcgacgaggacgagctccgggacgccgtcaggaagtacgccgccgctggcactacgacggctcctgcctcggcgtccgcctaa

SEQ ID NO: 8214 - protein, 126 aa, Zea mays
MAAEEGAVIACHTKDEFDARMAKAKEQGKLVVIDFMAPWCSGCQMMAPVYADCASKYPSAVFLEVDVDELLEVAKIYGVHVMPTFCFIRNGETLESFATVDEDELRDAVRKYAAAGTTTAPASASA

SEQ ID NO: 8215 - DNA, 534 bp, Zea mays
  CDS (1)..(534)
atggctcgccgactctgccgtctccctcgcctctttcccctcgtctcgtctgcatccgcctccgccgccccaagacctcatcacctccccttcgccgtgaaccctaaccccgcgcccctcgccccctccttctcgtcgtcatcgccgcccgcttttccgggcccccatcgcctcttctcttccacgagtggttcaagcatggtggtcgtgggctccgcggactccttcaacagcatcttttccaaggtgcaagatgaaaagctaccagctgtcttttactacacggcggtgtggtgtggaccatgtagggcgatcgcacctttagtatcaaagctgagcagccagtatcccaagataccggtgtacaaagttgacattgaattggaaggactgggaaacaaactccgtgatctaaacatatgttcagtgccgacgttccacttctatcacaaggggcagagaattagtgaaatcgtgggtgctgatgcaaagaaaattgaagctaccatggaaagtctccacaagcagcagtag

SEQ ID NO: 8216 - protein, 177 aa, Zea mays
MARRLCRLPRLFPLVSSASASAAPRPHHLPFAVNPNPAPLAPSFSSSSPPAFPGPHRLFSSTSGSSMVVVGSADSFNSIFSKVQDEKLPAVFYYTAVWCGPCRAIAPLVSKLSSQYPKIPVYKVDIELEGLGNKLRDLNICSVPTFHFYHKGQRISEIVGADAKKIEATMESLHKQQ

SEQ ID NO: 8217 - DNA, 369 bp, Zea mays; identical to SEQ ID NO: 1498
  CDS (1)..(369)

SEQ ID NO: 8218 - protein, 122 aa, Zea mays; identical to SEQ ID NO: 1499

SEQ ID NO: 8219 - DNA, 399 bp, Zea mays; identical to SEQ ID NO: 1500
  CDS (1)..(399)

SEQ ID NO: 8220 - protein, 132 aa, Zea mays; identical to SEQ ID NO: 1501

SEQ ID NO: 8221 - DNA, 387 bp, Zea mays; identical to SEQ ID NO: 1504
  CDS (1)..(387)

SEQ ID NO: 8222 - protein, 128 aa, Zea mays; identical to SEQ ID NO: 1505

SEQ ID NO: 8223 - DNA, 25 bp, Artificial sequence
  primer
atggttactcaattcaaaactgcca

SEQ ID NO: 8224 - DNA, 24 bp, Artificial sequence
  primer
ttaagcattagcagcaatggcttg

SEQ ID NO: 8225 - protein, 92 aa, Artificial sequence
  consensus sequence
  Variant (3)..(3): Xaa in position 3 is any amino acid
  Variant (5)..(5): Xaa in position 5 is any amino acid
  Variant (11)..(11): Xaa in position 11 is any amino acid
  Variant (12)..(14): Xaa in position 12 to 14 is any or no amino acid
  Variant (16)..(27): Xaa in position 16 to 27 is any amino acid
  Variant (28)..(34): Xaa in position 28 to 34 is any or no amino acid
  Variant (36)..(38): Xaa in position 36 to 38 is any amino acid
  Variant (40)..(50): Xaa in position 40 to 50 is any amino acid
  Variant (51)..(54): Xaa in position 51 to 54 is any or no amino acid
  Variant (57)..(60): Xaa in position 57 to 60 is any amino acid
  Variant (62)..(62): Xaa in position 62 is any amino acid
  Variant (64)..(68): Xaa in position 64 to 68 is any amino acid
  Variant (69)..(72): Xaa in position 69 to 72 is any or no amino acid
  Variant (74)..(78): Xaa in position 74 to 78 is any amino acid
  Variant (79)..(91): Xaa in position 79 to 91 is any or no amino acid
DFXAXWCGPCXXXXPXXXXXXXXXXXXXXXXXXXKXXXDXXXXXXXXXXXXXXXPTXXXXKXGXXXXXXXXXGXXXXXXXXXXXXXXXXXXL

SEQ ID NO: 8226 - protein, 14 aa, Artificial sequence
  protein pattern
  Variant (2)..(2): Xaa in position 2 is any or no amino acid
  Variant (4)..(4): Xaa in position 4 is any amino acid
  Variant (7)..(7): Xaa in position 7 is Ala, Gly or Pro
  Variant (10)..(13): Xaa in position 10 to 13 is any amino acid
FXAXWCXPCXXXXP

SEQ ID NO: 8227 - DNA, 237 bp, Saccharomyces cerevisiae
  CDS (1)..(237)
atgttgtgccaacagatgattagaacgacagctaagagaagtagcaatatcatgaccagacctattatcatgaagaggtcagtacacttcaaagacggtgtgtatgaaaatatcccattcaaagtcaaaggaagaaagacaccttacgccttatctcatttcgggttcttcgctattggatttgctgttccatttgttgcctgctatgttcaattgaaaaagtcaggtgctttttaa

SEQ ID NO: 8228 - protein, 78 aa, Saccharomyces cerevisiae
MLCQQMIRTTAKRSSNIMTRPIIMKRSVHFKDGVYENIPFKVKGRKTPYALSHFGFFAIGFAVPFVACYVQLKKSGAF

SEQ ID NO: 8229 - DNA, 222 bp, Kluyveromyces lactis NRRL Y-1140
  CDS (1)..(222)
atgttttcccaagttaccagactagccaccagaagagccttctctgccacttccaagcaatgtggtgcccacttcaaggaaggtgtttactcgaacatcccagttaagattcacaacagaaagatcccatacgctttcatccacttcggtttctttgctctaggttttgctgttccattcatctcttcttacgtgcaattgaagaagtttggtgctttctaa

SEQ ID NO: 8230 - protein, 73 aa, Kluyveromyces lactis NRRL Y-1140
MFSQVTRLATRRAFSATSKQCGAHFKEGVYSNIPVKIHNRKIPYAFIHFGFFALGFAVPFISSYVQLKKFGAF

SEQ ID NO: 8231 - DNA, 246 bp, Debaryomyces hansenii CBS767
  CDS (1)..(246)
atgttagctagatcaaagttgattactcaaaaggtttccaccagaaacttccaaacttcagccagaagcttcaacgacatttttggaagtccaaaatccggtgtttactcaaacattcctttcaaggtcaagaacagaaagattcctattagtttttggttctggggtatcacaggtagtttatttgcattcccattcgttagtacttactggcatttaaagaaggctggttcattcatggaataa

SEQ ID NO: 8232 - protein, 81 aa, Debaryomyces hansenii CBS767
MLARSKLITQKVSTRNFQTSARSFNDIFGSPKSGVYSNIPFKVKNRKIPISFWFWGITGSLFAFPFVSTYWHLKKAGSFME

SEQ ID NO: 8233 - DNA, 225 bp, Yarrowia lipolytica CLIB122
  CDS (1)..(225)
atgttccgagctaccgtccgatccgccaacaccgtggccaagcgaaacttctccaccaccaaggtgcgatctgtccactaccccgagggcccttaccataacctgcccttcaaggtccacaaccgaaagatcccctacgccttcctgcattttggtttcttccttgctggattccttgcccccttcggcattgtgtacgtccacaacaagcgagcccgaggctag

SEQ ID NO: 8234 - protein, 74 aa, Yarrowia lipolytica CLIB122
MFRATVRSANTVAKRNFSTTKVRSVHYPEGPYHNLPFKVHNRKIPYAFLHFGFFLAGFLAPFGIVYVHNKRARG

SEQ ID NO: 8235 - DNA, 25 bp, Artificial sequence
  primer
atgttgtgccaacagatgattagaa

SEQ ID NO: 8236 - DNA, 27 bp, Artificial sequence
  primer
ttaaaaagcacctgactttttcaattg

SEQ ID NO: 8237 - protein, 74 aa, Artificial sequence
  consensus sequence
  Variant (2)..(27): Xaa in position 2 to 27 is any amino acid
  Variant (28)..(33): Xaa in position 28 to 33 is any or no amino acid
  Variant (35)..(35): Xaa in position 35 is any amino acid
  Variant (37)..(37): Xaa in position 37 is any amino acid
  Variant (39)..(39): Xaa in position 39 is any amino acid
  Variant (41)..(41): Xaa in position 41 is any amino acid
  Variant (43)..(45): Xaa in position 43 to 45 is any amino acid
  Variant (48)..(48): Xaa in position 48 is any amino acid
  Variant (50)..(55): Xaa in position 50 to 55 is any amino acid
  Variant (57)..(61): Xaa in position 57 to 61 is any amino acid
  Variant (63)..(64): Xaa in position 63 to 64 is any amino acid
  Variant (67)..(69): Xaa in position 67 to 69 is any amino acid
  Variant (71)..(73): Xaa in position 71 to 73 is any amino acid
MXXXXXXXXXXXXXXXXXXXXXXXXXXXXXXXXGXYXNXPXKXXXRKXPXXXXXXGXXXXXFXXPFXXXYXXXK

SEQ ID NO: 8238 - protein, 44 aa, Artificial sequence
  protein pattern
  Variant (2)..(2): Xaa in position 2 is Pro or Val
  Variant (4)..(4): Xaa in position 4 is any amino acid
  Variant (6)..(6): Xaa in position 6 is Ile or Leu
  Variant (8)..(9): Xaa in position 8 to 9 is any or no amino acid
  Variant (11)..(12): Xaa in position 11 to 12 is any amino acid
  Variant (13)..(14): Xaa in position 13 to 14 is any or no amino acid
  Variant (17)..(17): Xaa in position 17 is any amino acid
  Variant (19)..(19): Xaa in position 19 is any amino acid
  Variant (20)..(20): Xaa in position 20 is Ala or Ser
  Variant (21)..(21): Xaa in position 21 is Phe or Leu
  Variant (22)..(22): Xaa in position 22 is any amino acid
  Variant (23)..(23): Xaa in position 23 is Phe or His
  Variant (24)..(24): Xaa in position 24 is Phe or Trp
  Variant (26)..(26): Xaa in position 26 is Phe or Ile
  Variant (27)..(27): Xaa in position 27 is any amino acid
  Variant (28)..(28): Xaa in position 28 is Ala, Gly or Leu
  Variant (29)..(29): Xaa in position 29 is any amino acid
  Variant (30)..(30): Xaa in position 30 is Gly or Leu
  Variant (32)..(32): Xaa in position 32 is Ala or Leu
  Variant (33)..(33): Xaa in position 33 is any amino acid
  Variant (36)..(36): Xaa in position 36 is Gly, Ile or Val
  Variant (37)..(37): Xaa in position 37 is any amino acid
  Variant (38)..(38): Xaa in position 38 is Cys, Ser, Thr or Val
  Variant (40)..(42): Xaa in position 40 to 42 is any amino acid
  Variant (44)..(44): Xaa in position 44 is Lys or Arg
GXYXNXPXXVXXXXRKXPXXXXXXGXXXXXFXXPFXXXYXXXKX

SEQ ID NO: 8239 - DNA, 303 bp, SACCHAROMYCES CEREVISIAE
  CDS (1)..(303)
atggctgtcaagactggtatcgctattggtttgaacaagggtaagaaagtcacccaaatgactccagccccaaagatctcctacaagaagggtgctgcctccaacagaaccaagttcgtcagatctttggttagagaaatcgccggtttgtccccatatgaaagaagattgatcgatttgatcagaaactccggtgaaaagagagccagaaaggtcgccaagaagagattgggttctttcaccagagccaaggctaaggtcgaagaaatgaacaacatcattgctgcctctcgtcgtcattaa

SEQ ID NO: 8240 - protein, 100 aa, SACCHAROMYCES CEREVISIAE
MAVKTGIAIGLNKGKKVTQMTPAPKISYKKGAASNRTKFVRSLVREIAGLSPYERRLIDLIRNSGEKRARKVAKKRLGSFTRAKAKVEEMNNIIAASRRH

SEQ ID NO: 8241 - DNA, 397 bp, Glycine max
  CDS (5)..(325)
cacgatgccgaaggaagtcaagcagaagtctggtctcatcgttggcctcaacgccggccacaaggtcacccccaggacccccgctcccaggatctcgaggaggaagggtttcctctccaagcgcactgcgtttgtccgtgagatcaccaaggaggttgctggtcttgccccatacgagaagcgcatcatcgaattgcttcgcaactccaaggacaagcgtgcccgccgtctagcgaagaagaggctcggtaccttcggtcgctcaaagagaaaggtcgacgagatgaccaaggtcatcgccgagtcgaggcgcgctggtcactaaacggtttcacgatttgcggtggatgaagcaacacggcgaacgaacgaccgacttacttttcgattttattct

SEQ ID NO: 8242 - protein, 106 aa, Glycine max
MPKEVKQKSGLIVGLNAGHKVTPRTPAPRISRRKGFLSKRTAFVREITKEVAGLAPYEKRIIELLRNSKDKRARRLAKKRLGTFGRSKRKVDEMTKVIAESRRAGH

SEQ ID NO: 8243 - DNA, 333 bp, Glycine max
  CDS (1)..(333)
atggctcccaaaccgcctagtacgggtctgtttgttggactgaacaagggtcacgtcgtcaccaagaaggaattgcccccacgcccctcagatcgtaaggggaaaacaagcaagagggtgcactttgtgaggaacctcataagagaggttgctggttttgcaccctatgaaaagcgtataactgagttgctgaaggttgggaaggataagagggcactgaaggttgcaaagagaaagctcggaacacacaaacgcgcaaagaagaagcgtgaggaaatgtccagtgttctcaggaagatgagggctggtggtgctggagacaagaagaaataa

SEQ ID NO: 8244 - protein, 110 aa, Glycine max
MAPKPPSTGLFVGLNKGHVVTKKELPPRPSDRKGKTSKRVHFVRNLIREVAGFAPYEKRITELLKVGKDKRALKVAKRKLGTHKRAKKKREEMSSVLRKMRAGGAGDKKK

SEQ ID NO: 8245 - DNA, 589 bp, Glycine max
  CDS (94)..(426)
  misc_feature (585)..(585): n is a, g, c or t
  misc_feature (587)..(587): n is a, g, c or t
  misc_feature (588)..(588): n is a, g, c or t
cgagatgacgacagaaggggaccctagtttctgttctccctctttcaccgcagtgttagggtttctgtagcctccaaccagaaagagagggaaatggctcccaaacatcctagtacgggtttgtttgttggattgaacaagggtcacgttgtcaccaagaaggagttgcctccacgcccttcagatcgtaaggggaaaacaagcaagcgagtgcactttgtgaggaacctcattcgagaggttgccggctttgcaccttatgaaaagcgaataactgagttgctcaaggttggaaaagataagagggcactgaaagttgccaagagaaagcttggaacccataagcgcgcaaagaagaagagagaggagatgtccaatgttctccggaagatgagggctggtggagctggagacaagaagaaataagtcttgtttactttttctagtttcactagactgtttcgatgtacgagttgtcttatttttgttttagttcaagattttgctttgagaaatatgttttacctaatcgagacatgatttactccaaaagtacaattggcttattttcgacatgcattcccnanna

SEQ ID NO: 8246 - protein, 110 aa, Glycine max
MAPKHPSTGLFVGLNKGHVVTKKELPPRPSDRKGKTSKRVHFVRNLIREVAGFAPYEKRITELLKVGKDKRALKVAKRKLGTHKRAKKKREEMSNVLRKMRAGGAGDKKK

SEQ ID NO: 8247 - DNA, 405 bp, Glycine max
  CDS (17)..(361)
gtaaactcgagtagaaatggcgccgcgctacgaaatggctgtgggcctccacaaggggcacaaaaccaccaaaatccgtaccctcaagacagttgctgctactgttgacaagagaaacaggatgcgtccctccaggaccaagggtctccagaccaagcacaccaaatttgtgcgagacctgatccgtgaagttgttggacacgctccctatgaaaagagggctatggaattgttgaaggtttccaaggataagagagctctgaagtaccttaagaggaggttgggcacccacatccgtgccaagaggaagcgtgaagagctctccaacattctcacccagatgcgtaagcacgccaagtaatctgtccttttctaagccattaaactttaaaaaacccaaaaaaa

SEQ ID NO: 8248 - protein, 114 aa, Glycine max
MAPRYEMAVGLHKGHKTTKIRTLKTVAATVDKRNRMRPSRTKGLQTKHTKFVRDLIREVVGHAPYEKRAMELLKVSKDKRALKYLKRRLGTHIRAKRKREELSNILTQMRKHAK

SEQ ID NO: 8249 - DNA, 663 bp, Sorghum bicolor
  CDS (67)..(402)
gcgccggccgggccgggctccgtagcagccggttcacttctacaggtaaggaaagggttcgtcctcatggcgccgccgcagccgaagtcgggcctcttcgtgggcatcaacaagggccatgtcgtcaccaagcgcgagctgcctccgcgcccgtcccaccgcaaggggaaagcaacgaagagggtgtccatggtcaggggcctgatcagagaggttgctggctttgctccttatgagaagcgtatcactgagcttctgaaggttggcaaggacaagcgtgctctgaaggttgccaagagaaagcttggaactcacaagagggcaaagaagaagagagaggagatggctggtgtcctcaggaagatgagatcggctggtacgcacacagacaagaagaaatagagcatttcaagtttatgaagctggcggccagagattctgttccggtgtctgtttttcctacttgtagaacgtaatagacatgtcaaagtatctgtcagcgaaatattgtgttgttagttatgtatcgaaccacctcatggggattttgcaacaactttcaatgtatccatggtttgttaatcttttgctttggctttgcaaaaagaaaacaaaaaatgattactgcgtattgaatgctatggttgcaatccaaaaaaaaaa

SEQ ID NO: 8250 - protein, 111 aa, Sorghum bicolor
MAPPQPKSGLFVGINKGHVVTKRELPPRPSHRKGKATKRVSMVRGLIREVAGFAPYEKRITELLKVGKDKRALKVAKRKLGTHKRAKKKREEMAGVLRKMRSAGTHTDKKK

SEQ ID NO: 8251 - DNA, 321 bp, Zea mays
  CDS (1)..(321)
atgccgaaagaagtcaagcaaaagtcaggcctcatcgttggcattaacgccggccacaaggtcactcccaggactcctgctcccaggatctccaggaggaagggtttcctgtccaagcgcactgctttcgtccgtgagatcaccaaggaggttgctggtcttgccccctacgagaagcgcatcattgaattgctccgaaactccaaggacaagcgtgctcgtcgtctagctaagaagaggctcggtaccttcggccgctcaaagagaaaggtcgacgagatgaccaaggtcatcgccgagtcgaggcgcgcgggtcactaa

SEQ ID NO: 8252 - protein, 106 aa, Zea mays
MPKEVKQKSGLIVGINAGHKVTPRTPAPRISRRKGFLSKRTAFVREITKEVAGLAPYEKRIIELLRNSKDKRARRLAKKRLGTFGRSKRKVDEMTKVIAESRRAGH

SEQ ID NO: 8253 - DNA, 631 bp, Zea mays
  CDS (62)..(400)
atttcgcggcggcttagggttttaactcgcttccattctcaaggttagcaggagaccggccatggcgccgtcgcagcccaagtcagggctcttcgtgggcatcaacaagggccacgtcgtcaccaagcgcgagctgccgccacgcccgtccgaccggaaggggaaaggtaccaagagggtgctgtttgtccggaacttgattagggaggttgctggatttgctccctatgagaagcgtatcactgagcttcttaaggttggaaaggacaagcgtgcactcaaggtcgccaagaggaagcttggtactcacaagagagcaaagaagaagagggaggagatgtcaagtgtcctcaggaagatgaggtctggtggtggtggtgctgcggacaagaagaaatagaacttggctagctggtgaattttatccggaagcaaagtcctgtattaccagtccgtacctatagagctatggccattgtgttgacactatctttagcccgtggtttctattttgagaagaccaatctctttaagatttttacatgagtctggtgcctttgtttgattacttggtactctgctgtttattcagttatgtagcttgtctgggttttgtacctgcgattgttat

SEQ ID NO: 8254 - protein, 112 aa, Zea mays
MAPSQPKSGLFVGINKGHVVTKRELPPRPSDRKGKGTKRVLFVRNLIREVAGFAPYEKRITELLKVGKDKRALKVAKRKLGTHKRAKKKREEMSSVLRKMRSGGGGAADKKK

SEQ ID NO: 8255 - DNA, 430 bp, Zea mays
  CDS (36)..(338)
gccggccgggttccggctcttttattaacatcacaatggttgctgcaaagtctggaatcgctgttggtatcaacaagggtcacatcaccgctcgtcgtgaactcaaggccaagccctctaacaaaattggtgcttccaagcgtaccactttcgtaaagtccattgttcgtgaagttgctggttatgctccttatgaacgtcgtcttatggaattgatcaagaactccaaggataagcgtgccaagaagctttgcaagtccaagcttggtacttttgttcgtgccaagaagaagattgaagaacttcaaggtgttattgctgcttctcgtcgtcactaaattcttgatttttaacatgtggaataaatcaagaatgctctttcgagcaagttgggcatatacgcgaaaaaaaaaaaaaaaaaaggccccta

SEQ ID NO: 8256 - protein, 100 aa, Zea mays
MVAAKSGIAVGINKGHITARRELKAKPSNKIGASKRTTFVKSIVREVAGYAPYERRLMELIKNSKDKRAKKLCKSKLGTFVRAKKKIEELQGVIAASRRH

SEQ ID NO: 8257 - DNA, 409 bp, Triticum aestivum
  CDS (53)..(373)
ctcgtgcccccccccgcgcgcccgactcgccacgtcgcacgacttgtacgcaatggcagccgaacgcaaagagcgcagcggaatcgctgtaggcctcaacaaaggacacaaaactgaggcacgagtccccaagcctcgagttagtagaaccaagggtcacttgagcaagcggactgcatttgtgcgtgaaattgtcaaagaagtatcgggacttgccccatatgaacgaagggtaatcgaattacttcgcaacagcaaagacaaacgtgcccgcaagttggctaagaagaggctcgggacatttggccgcgcaaaggcaaaggtagacgagcttcagcgtgtaatcgccgagtcacgaagagccggtcactagagatataaaaatattgaatgaaaaattaaactataa

SEQ ID NO: 8258 - protein, 106 aa, Triticum aestivum
MAAERKERSGIAVGLNKGHKTEARVPKPRVSRTKGHLSKRTAFVREIVKEVSGLAPYERRVIELLRNSKDKRARKLAKKRLGTFGRAKAKVDELQRVIAESRRAGH

SEQ ID NO: 8259 - DNA, 336 bp, Triticum aestivum
  CDS (1)..(336)
atggcgccgtcgcagcccaagtcagggctcttcgtgggcatcaacaagggccacgtcgtcaccaagcgcgagctgccgccacgcccgtccgaccgcaaggggaaaggtaccaagagggtgctgtttgtcaggaacttgattagggaggttgctggatttgctccctatgagaagcgtatcactgagcttcttaaggttggaaaggacaagcgtgcactcaaggtcgccaagaggaagcttggtactcacaagagagcaacgaagaagagggaggagatgtcaagtgtcctcaggaagaaaaataagacttccaaatcccagctaataaaaccgtga

SEQ ID NO: 8260 - protein, 111 aa, Triticum aestivum
MAPSQPKSGLFVGINKGHVVTKRELPPRPSDRKGKGTKRVLFVRNLIREVAGFAPYEKRITELLKVGKDKRALKVAKRKLGTHKRATKKREEMSSVLRKKNKTSKSQLIKP

SEQ ID NO: 8261 - DNA, 403 bp, Triticum aestivum
  CDS (23)..(358)
gaggtaaaggaaaggttcgcccatggctccgtcgcagcccaagtcgggcctcttcgtgggcatcaacaagggccacgtcgtcaccaagcgcgagctgccgccgcgcccgtccgaccgcaaggggaaaggtaccaagagggtgcatttcgtcaggaacttgatcagggaggtagctgggtttgctccgtatgagaagcgtatcactgagcttctcaaggttggcaaggacaagcgtgccctgaaggtggcgaagcgaaagttgggtacccacaagagggcgaagaagaagagagaggagatgtccagtgtcctcaggaagatgagatctgccggaactggaaccgagaagaagaaatagagcatcccaagctcatgaaattgatggcaatcttctgttctggtg

SEQ ID NO: 8262 - protein, 111 aa, Triticum aestivum
MAPSQPKSGLFVGINKGHVVTKRELPPRPSDRKGKGTKRVHFVRNLIREVAGFAPYEKRITELLKVGKDKRALKVAKRKLGTHKRAKKKREEMSSVLRKMRSAGTGTEKKK

SEQ ID NO: 8263 - DNA, 586 bp, Gossypium hirsutum
  CDS (76)..(408)
tcgcccacgcgttcgcccacgcgtgcggcttcgagttcttttaggtgattttctgttagggctggttggtaggtgatggctccaagtcaacctaaaactggcctttctgtgggcttaaacaaaggacatgttgttaccaagaaggaattggctccccacccttctaatagaaaggggaaaactagcaagagagtccactttgtgaggagcctaattcgggaggttgctggtttcgctccgtatgagaagaggataactgaacttctcaaagttgggaaagataagcgtgctttgaaggtggcgaagagaaagctaggcactcacaagcgggccaagaagaagcgtgaggagatgtctagcgttctccgcaagatgaggtcagctggaggtggggagaaaaagaagtgagttgccctgcggttgtgcttcaaagcaagtattgagtttttagatttgttaaattttctcttcagttttgttttgagagtttggagtactgattcggatagcattcttttacttgtgttggatatttaaaaaaaacatgaaatttgcatcacttaattgcaatctagattcgattatg

SEQ ID NO: 8264 - protein, 110 aa, Gossypium hirsutum
MAPSQPKTGLSVGLNKGHVVTKKELAPHPSNRKGKTSKRVHFVRSLIREVAGFAPYEKRITELLKVGKDKRALKVAKRKLGTHKRAKKKREEMSSVLRKMRSAGGGEKKK

SEQ ID NO: 8265 - DNA, 504 bp, Gossypium hirsutum
  CDS (19)..(357)
atcgccgtctcgagaggcatggccaccaagcagccaaatacaggcctttttgtaggactaaacaagggccatgttgtaaccaagaaggaattggctccacgtccatctaacagaaaaggaaaaactagcaaaagagtccattttgtgaggaacttgataagggaagttgctggttttgcaccgtatgagaagaggattacggagcttttgaaggttggtaaggacaagcgagctctcaaggtagctaaaagaaaattgggaactcacaagagagccaagaagaagcgtgaagagatgtcgagtgttctccgcaagatgagggctcatcatcctggaggtggagacaagaagaagtgaagcttttatttttgttgatttatggacaagcttgaaggtttgatttagtagctgttagagattttgtttagcactttgtttgagactgaaaatcatgcactcaaatttgctgctttacatgaattactgcaagtttttttttttttt

SEQ ID NO: 8266 - protein, 112 aa, Gossypium hirsutum
MATKQPNTGLFVGLNKGHVVTKKELAPRPSNRKGKTSKRVHFVRNLIREVAGFAPYEKRITELLKVGKDKRALKVAKRKLGTHKRAKKKREEMSSVLRKMRAHHPGGGDKKK

SEQ ID NO: 8267 - DNA, 336 bp, Gossypium hirsutum
  CDS (1)..(336)
atggctaccaagcagccaaatactggcctctttgtgggactgaacaagggccatgttgtaaccaagaaggagttggctccacgcccctctaatcggaaaggaaaaacgagcaaaagagtccatttcgtgaggaacttgatcagggaagttgctggttttgcaccgtatgagaagaggatcactgagcttttgaaagtcggtaaggacaagcgagctcttaaggtagctaaaagaaagttgggaactcacaaaagggcaaagaagaagcgtgaagagatgtccagcgttctccgcaagatgagagcccacggtggaggtgcagaaaagaagaaataa

SEQ ID NO: 8268 - protein, 111 aa, Gossypium hirsutum
MATKQPNTGLFVGLNKGHVVTKKELAPRPSNRKGKTSKRVHFVRNLIREVAGFAPYEKRITELLKVGKDKRALKVAKRKLGTHKRAKKKREEMSSVLRKMRAHGGGAEKKK

SEQ ID NO: 8269 - DNA, 408 bp, Gossypium hirsutum
  CDS (4)..(339)
ggaatggctaccaagcagccaaatactggcctctttgtgggactgaacaagggccatgttgtaaccaagaaggagttggctccacgtccctctaatcggaaaggaaaaactagcaaaagagtccattttgtgaggaacttgattagggaagttgctggttttgcaccatatgagaagaggattactgaacttctgaaagttggtaaggacaaacgagcgctcaaggttgctaaaagaaagttgggaactcacaaaagggcaaagaagaagcgtgaggagatgtctagtgtgctccgcaagatgagggctcaccctggaggtggagaaaagaagaagtgaagctctctggtgacaagtcaccttgatgatttcattagagaacttttgttagcatatatttcaacttat

SEQ ID NO: 8270 - protein, 111 aa, Gossypium hirsutum
MATKQPNTGLFVGLNKGHVVTKKELAPRPSNRKGKTSKRVHFVRNLIREVAGFAPYEKRITELLKVGKDKRALKVAKRKLGTHKRAKKKREEMSSVLRKMRAHPGGGEKKK

SEQ ID NO: 8271 - DNA, 360 bp, Bombyx mori
  CDS (1)..(360)
atggctcctcgttttgaaatcgcagtaggcctgcgaaaaggccacaaaacaactaaaatatccgctggccgcaagggtatcacagacaaagccatcagaattaggccagctagactaaagggtcttcaaacgaaacactccaagtttgtccgtgatttagtacgcgaagttgtcggacacgctcaatatgagaagagggctatggagttacttaaggtgtcaaaagacaagcgtgctctgaagttcttgaagcgacgattgggcacacacatccgcgccaagaggaagcgtgaagaacttagcaacgtgctcgctcagatgaggaaggcagccgcccaggctcatcaccatcaccattaa

SEQ ID NO: 8272 - protein, 119 aa, Bombyx mori
MAPRFEIAVGLRKGHKTTKISAGRKGITDKAIRIRPARLKGLQTKHSKFVRDLVREVVGHAQYEKRAMELLKVSKDKRALKFLKRRLGTHIRAKRKREELSNVLAQMRKAAAQAHHHHH

SEQ ID NO: 8273 - DNA, 312 bp, Arabidopsis thaliana
  CDS (1)..(312)
atgacaactccacaagtgaagaccggtttgttcgttgggttgaacaagggacatgttgttaccagacgtgaattagctcctcgtcctcgttctcgcaaaggaaaaacgagcaagaggacaatctttatcagaaacttgataaaggaagttgctggtcaagctccctatgagaagagaatcactgagcttttgaaggttgctaagaggaagttgggaacccacaagagagccaagcgaaagagagaggagatgtccagtgttctccgcaagatgaggtctggcggtggtggtgcaactgagaagaagaagtga

SEQ ID NO: 8274 - protein, 103 aa, Arabidopsis thaliana
MTTPQVKTGLFVGLNKGHVVTRRELAPRPRSRKGKTSKRTIFIRNLIKEVAGQAPYEKRITELLKVAKRKLGTHKRAKRKREEMSSVLRKMRSGGGGATEKKK

SEQ ID NO: 8275 - DNA, 624 bp, Strongylocentrotus purpuratus
  CDS (14)..(355)
gaaattcgaaaacatggcgattcgacatgagatggccgttggcctcaacaaggggcacaagatgaccaagaacagcaccgtcaagaaagcaaccaggaaagggattaacaagcatgctaagttcgtgcgtgacctgattcgtgaggtgactggacttgctccatacgagaagaggtgcatggagttcctcagggttggcaaggacaagaaggctctcaagttctgcaagaggaggttgggaactcttggccgtggccgcagaaagcgtgaggagatgaacgccatcttagccgcccagaggaaggccgcctccgctgctgcacaagccgcctccgcagccgagaaggccaagtaaaccaacaatgactcatgtgaacaggatatatgtggactctgtatatatcctaggacctgttttattcccatcatgggccaatatggaagaacttctagttagtccttgtaaatgtgcggttttacgagagctgcatggggtcttcatattcttcaagctccgatagttgacagaggggtatgatgtcattttgcaaactgattggtagatcttcaggtattgatgtgatcattttgtgaataaaagagagcgggatattaacagagaaa

SEQ ID NO: 8276 - protein, 113 aa, Strongylocentrotus purpuratus
MAIRHEMAVGLNKGHKMTKNSTVKKATRKGINKHAKFVRDLIREVTGLAPYEKRCMEFLRVGKDKKALKFCKRRLGTLGRGRRKREEMNAILAAQRKAASAAAQAASAAEKAK

SEQ ID NO: 8277 - DNA, 417 bp, Nasonia vitripennis
  CDS (9)..(359)
tccacaggatggcacccaggtacgaattggccatcggcctcaacaagggtcacaaaaccaccaagattagggtggcgaaaaacaaatccgagaaggagaagaccgttgccatcagaccagccaggctaaaggggcgtcagaccaaacacagcaaatttgtgcgagacttgatccgtgaagtcactggacatgctccctatgagaagcgcgctatggagttgttgaaggtttcaaaggataagcgtgccctcaaattcttgaaaaggaggttgggtactcacattcgcgctaagaggaagcgtgaggagcttggaaacatccttgtacaaatgaggaaggccgccgcacagcatcattaagtgctgttttgtatttataaggattatttactggatcaataaacacctttgacacaag

SEQ ID NO: 8278 - protein, 116 aa, Nasonia vitripennis
MAPRYELAIGLNKGHKTTKIRVAKNKSEKEKTVAIRPARLKGRQTKHSKFVRDLIREVTGHAPYEKRAMELLKVSKDKRALKFLKRRLGTHIRAKRKREELGNILVQMRKAAAQHH

SEQ ID NO: 8279 - DNA, 524 bp, Aedes aegypti
  CDS (38)..(379)
ttcttttccggctgtcatttacaccgaggaggaaaacatggctccccgatacgaaatctgtgtcggtcttaacaaaggccacaagaccacgaagctgaggcagctgcagtaccgcggcgatcgcaaggtcaagggaatccgcccgtcccgtacaaagggaatccaaaccaagcacaccaagttcgtccgcgatttggtccgggaggtcgttggtcatgccccgtacgagaagcgcggtatggaattgctgaaggtgtccaaggataagcgcgccctgaagttcctgaagcgtcgcctcggaacgcacatccgcgccaagaggaagcgtgaggaactgtccaacatcctggcccatatgcgtaaggccgcccacaagtaagctgctgcagcattggcttgtgcgtgagaactttacaccgttcgctctgtttgtaatttaaggattactacatcccaaaaaccttctgtgaagaaaaagtaccctttaaaatataaacaaaatcgtttactgaatcagctatgct

SEQ ID NO: 8280 - protein, 113 aa, Aedes aegypti
MAPRYEICVGLNKGHKTTKLRQLQYRGDRKVKGIRPSRTKGIQTKHTKFVRDLVREVVGHAPYEKRGMELLKVSKDKRALKFLKRRLGTHIRAKRKREELSNILAHMRKAAHK

SEQ ID NO: 8281 - DNA, 490 bp, Aedes aegypti
  CDS (35)..(376)
tattccggctgtcatttacaccgaggaggaaaacatggctccccgatacgaaatctgtgtcggtcttaacaaaggccacaagaccacgaagctgaggcagctgcagtaccgcggcgatcgcaaggtcaagggaatccgcccgtcccgtacaaagggaatccaaaccaagcacaccaagttcttccgcgatttggtccgggaggtcgttggtcatgccccgtacgagaagcgcggtatggaattgctgaaggtgtccaaggataagcgcgccctgaagttcctgaagcgtcgcctcggaacgcacatccgcgccaagaggaagcgtgaggaactgtccaacatcctggcccatatgcgtaaggccgcccacaagtaagctgctgcagcattggcttgtgtgtgagaactttacaccgttcgctctgtttgtaatttaaggattactacatcccaaaaaccttctgtgaagaaaaagtaccctttaaaatat

SEQ ID NO: 8282 - protein, 113 aa, Aedes aegypti
MAPRYEICVGLNKGHKTTKLRQLQYRGDRKVKGIRPSRTKGIQTKHTKFFRDLVREVVGHAPYEKRGMELLKVSKDKRALKFLKRRLGTHIRAKRKREELSNILAHMRKAAHK

SEQ ID NO: 8283 - DNA, 330 bp, Magnaporthe grisea 70-15
  CDS (1)..(330)
atggctcccaccaagaagggcgaggtcccccgtaccggtcttgctaccggccttaaccgcggcttcaaaaccaccgccagggtcaccaagccccgcgttagcaccaccaagggccacctcagcaagaggactgctttcgtccgcgagctcgtcaaagaggtcgctggccttgccccctatgagcgccgtgttatcgagctgctgaggaacggcaaggacaagcgtgcccgcaagctggccaagaagcgcctcggtacttttggccgcgccaaggccaaggttgagcagctccagaccgtcattgctgaggcccgtcgtgccggccactaa

SEQ ID NO: 8284 - protein, 109 aa, Magnaporthe grisea 70-15
MAPTKKGEVPRTGLATGLNRGFKTTARVTKPRVSTTKGHLSKRTAFVRELVKEVAGLAPYERRVIELLRNGKDKRARKLAKKRLGTFGRAKAKVEQLQTVIAEARRAGH

SEQ ID NO: 8285 - DNA, 321 bp, Gibberella zeae PH-1
  CDS (1)..(321)
atggccgctgatacccccgcgaagtccggtctggccgttggcctcaacaagggccacaaaactaccccccgtgttgtcaagccccgtgtttcccgaaccaagggtcacctgagcaagcgcaccgctttcgttcgcgaggttgtcaaggaggttgctggcctcgccccctacgagcgccgagtcatcgagttgctccgcaactccaaggacaagcgtgcccgtaagctcgctaagaagagactcggtaccttcggccgtgccaaggccaaggtcgacgagctccagcgtgtcatcgctgagtctcgccgtgctggtcactaa

SEQ ID NO: 8286 - protein, 106 aa, Gibberella zeae PH-1
MAADTPAKSGLAVGLNKGHKTTPRVVKPRVSRTKGHLSKRTAFVREVVKEVAGLAPYERRVIELLRNSKDKRARKLAKKRLGTFGRAKAKVDELQRVIAESRRAGH

SEQ ID NO: 8287 - DNA, 303 bp, Kluyveromyces lactis NRRL Y-1140
  CDS (1)..(303)
atggccgttaagtcaggtattgctgttggtttgaacaaaggtaagaaggtcaaccaattgaccccagccccaaagatttcttacagaaagggtgctgcttcccaaagaaccactttcgtcagatctatcgttaaggaagtcgcttctttggctccatacgaaagaagattgatcgaattgatcagaaacgctggtgaaaagagagctagaaaggtcgcaaagaagagattgggaactttcggtagagctaaggctaaggttgaagaaatgaacgaaatcattaccgcttctcgtcgtcattaa

SEQ ID NO: 8288 - protein, 100 aa, Kluyveromyces lactis NRRL Y-1140
MAVKSGIAVGLNKGKKVNQLTPAPKISYRKGAASQRTTFVRSIVKEVASLAPYERRLIELIRNAGEKRARKVAKKRLGTFGRAKAKVEEMNEIITASRRH

SEQ ID NO: 8289 - DNA, 300 bp, Debaryomyces hansenii CBS767
  CDS (1)..(300)
atggctagatcaggtattgctgttggattaaacaagggacacaaggttgtcgccaaggaagttgctccaaaggtctcttacagaaagggtgctttatccaagagaactgaattcgttagaaacatcgtcaaggaagtttccggattagctccatatgaaagaagattgatcgaattgatcagaaatgctggtgaaaagagagctaagaagttggctaagaagagattaggtacccacaagagagcccttagaaagatcgaagaaatgaacaaggtcattgctgaatcaagaagacattaa

SEQ ID NO: 8290 - protein, 99 aa, Debaryomyces hansenii CBS767
MARSGIAVGLNKGHKVVAKEVAPKVSYRKGALSKRTEFVRNIVKEVSGLAPYERRLIELIRNAGEKRAKKLAKKRLGTHKRALRKIEEMNKVIAESRRH

SEQ ID NO: 8291 - DNA, 348 bp, Apis mellifera
  CDS (1)..(348)
atggctccaagatttgaattagcaattggtcttaatagaggccataaaacaactaaaattcgtgtggcaaaaaataaaaatgagaagaaaaaaacagtatgtgttttaccagcaagattaaaagggagacaaactaaacatagcaaatttgtcagagacttaattcgtgaagtaactggtcatgcaccatatgaaaagcgtgctatggaattattaaaagtttccaaagataaacgtgcattgaaatttttaaaaagaaggttgggtacacatatcagagctaaaaggaagcgtgaagaacttggaaatattcttgtccaaatgaggaaagctgctgcacatcattaa

SEQ ID NO: 8292 - protein, 115 aa, Apis mellifera
MAPRFELAIGLNRGHKTTKIRVAKNKNEKKKTVCVLPARLKGRQTKHSKFVRDLIREVTGHAPYEKRAMELLKVSKDKRALKFLKRRLGTHIRAKRKREELGNILVQMRKAAAHH

SEQ ID NO: 8293 - DNA, 424 bp, Tribolium castaneum
  CDS (48)..(383)
atttggtgaacacgcgtttgttggtgaattatttccaataaaccatcatggcaccgcgttacgaactcgctatcggtctccaaaggggccacaaaaccacaaaaattccctctggaaagaccaaagccgacaaggtccgtcctgcacggttgaaggggcaccaaaccaaacacacgaaattcgtccgcgacctcattcgtgaagtcgtgggccacgctccgtacgaaaaacgtgctatggaattgctgaaagtgtcgaaagacaagcgcgccctcaagttcttgaagcgccgtcttggcacccacattcgtgccaagaggaagcgtgaagagttgtccaacattctgacacaaatgcgtaaagcacaagctcacgctaagtaaatgtatttttaagtttttgacattaaaaacataacagtaaa

SEQ ID NO: 8294 - protein, 111 aa, Tribolium castaneum
MAPRYELAIGLQRGHKTTKIPSGKTKADKVRPARLKGHQTKHTKFVRDLIREVVGHAPYEKRAMELLKVSKDKRALKFLKRRLGTHIRAKRKREELSNILTQMRKAQAHAK

SEQ ID NO: 8295 - DNA, 354 bp, Maconellicoccus hirsutus
  CDS (1)..(354)
atggcacctcgctacgaattagcggtcggtcttagaaaaggccatcaaacgaccaaaatacgagctatcaaacctaccttagaaaacaagaaaaagaagattaaaccatcgcatttgaaaggacatcaaaccaaacatgccaaacttattcgtgacttgatcagagaagtagttggtaatgctccttttgaaaagagagccatggaattgcttaaagtatccaaggataaaagagcccttaaatttttgaaaagacgattgggaacacatttacgtgctaagaggaagcgtgaagaattgagtaatcttctattggctatcaggaaagctcagtcgcagaaaacgaacgtttaa

SEQ ID NO: 8296 - protein, 117 aa, Maconellicoccus hirsutus
MAPRYELAVGLRKGHQTTKIRAIKPTLENKKKKIKPSHLKGHQTKHAKLIRDLIREVVGNAPFEKRAMELLKVSKDKRALKFLKRRLGTHLRAKRKREELSNLLLAIRKAQSQKTNV

SEQ ID NO: 8297 - DNA, 333 bp, Oryza sativa subsp
  CDS (1)..(333)
atggcgccgccgcagcccaagtcggggctcttcgtcggcatcaacaagggccacgtcgtcaccaagcgcgagctgccacctcgcccgtccgaccgcaaggggaaaagtaccaagagggtgaattttgtcaggggcttgattagggaggttgtgggatttgctccatatgagaaacgaatcactgagcttctgaaggttggaaaggacaagcgtgcactgaaggtcgctaagagaaagctcggtacccacaagagagcaaagaagaagagagaggagatggtgggtgtcatcaggaagatgaggtctgctggtactactgacaagaagaaatag

SEQ ID NO: 8298 - protein, 110 aa, Oryza sativa subsp
MAPPQPKSGLFVGINKGHVVTKRELPPRPSDRKGKSTKRVNFVRGLIREVVGFAPYEKRITELLKVGKDKRALKVAKRKLGTHKRAKKKREEMVGVIRKMRSAGTTDKKK

SEQ ID NO: 8299 - DNA, 432 bp, Oryza sativa subsp
  CDS (1)..(432)
atggcgccgccgcagcccaagtcggggctcttcgtcggcatcaacaagggccacgtcgtcaccaagcgcgagctgccacctcgcccgtccgaccgcaaggggaaaagtaccaagagagtgaattttgtcaggggcttgattagggaggttgtgggatttgctccatatgagaaacgaatcactgagcttctgaaggttggaaaggacaagcgtgcactgaaggtcgctaagagaaagctcggtacccacaagagagcaaagaagaagagagaggagatggcgggtgtcatcaggaagatgagaatgggttctactccctctggtttcataatttttgactttttgaacaatgacacgctatgtaggggtgcaagtggacaataccactatttgcataaataccttcttgctagttcatttcccacatggtag

SEQ ID NO: 8300 - protein, 143 aa, Oryza sativa subsp
MAPPQPKSGLFVGINKGHVVTKRELPPRPSDRKGKSTKRVNFVRGLIREVVGFAPYEKRITELLKVGKDKRALKVAKRKLGTHKRAKKKREEMAGVIRKMRMGSTPSGFIIFDFLNNDTLCRGASGQYHYLHKYLLASSFPTW

SEQ ID NO: 8301 - DNA, 333 bp, Vitis vinifera
  CDS (1)..(333)
atggctccaaaacagccaaatactggcctcttcgtgggcctaaacaaaggacatgtggtgacaaagaaggaactccctccacgcccttctgatagaaaggggaaaaccagtaaaagagttcactttgtgcggaatatcatcagggaagtagctggttttgctccttatgagaagagaatcactgaacttcttaaggttgggaaagacaagcgagccttgaaagttgcgaagagaaagttaggcacacacaagagagcaaaaaagaagcgtgaggagatgtccagtgtcctacgcaagatgaggtctggtggagttggagagaagaagaagtga

SEQ ID NO: 8302 - protein, 110 aa, Vitis vinifera
MAPKQPNTGLFVGLNKGHVVTKKELPPRPSDRKGKTSKRVHFVRNIIREVAGFAPYEKRITELLKVGKDKRALKVAKRKLGTHKRAKKKREEMSSVLRKMRSGGVGEKKK

SEQ ID NO: 8303 - DNA, 553 bp, Spadella cephaloptera
  CDS (80)..(400)
ggaagcttataattgagtagtttcaatttgtttaaagttttattttgtgacaggaaaaggttattcttaaactagaactatggctcccaaatacgctatggctattggtcgcgtcagggataagggctttcgcaccaccaaaaacaaggctacggtgaaaccttcgaggagaaagggcgtccaacacaagcatgtccgattcgttcgggatacggttagagaaatcgccggtttcgccccctacgaaaagcgatgcctcgagttgctcaaggtatccaaggataagcggtgcttgaagttcgccaagaaacgtctcggggcccacatccgcggcaagagaaagcgggaagagatgcaggccgtgctccaggcgcaacgcaaagccgctaccaagcagtgatcctcgcgactttttactaattcacacttcatcttaggagcgtgggtgcccatttgattaaaactgtttcaatgacccgttaaatcgttttcaatcgcttcagtaaggttgtttttttttcctattcccgtttctatattaaaaaaaatgttt

SEQ ID NO: 8304 - protein, 106 aa, Spadella cephaloptera
MAPKYAMAIGRVRDKGFRTTKNKATVKPSRRKGVQHKHVRFVRDTVREIAGFAPYEKRCLELLKVSKDKRCLKFAKKRLGAHIRGKRKREEMQAVLQAQRKAATKQ

SEQ ID NO: 8305 - DNA, 598 bp, Spadella cephaloptera
  CDS (88)..(405)
ggaagcttataattgagtagtttcaatttgtttaaattataagatactttttcgttaaaaccaaagttttaagagcgaaacgtcgagatggctcccaaatacgctatggcgatcggacgggtccgggacaagggattccggacgacgaaacacgaagcacccgtcaagccctcccggcgaaagggtgtccaacacaagcacgtcaagtttgtaagagaattagtgagggaaatcggaggattcgctccttacgagaagcgatgcttggagttgttgaaggtttcaaaggacaagcgctgtctcaaatttgccaagaagcgtctcggagctcacatccgtggaaagcggaagcgcgaggagatgcaatccgtgctccaagcgcagaggaaggccgccaacaagtagactcccgcctctgccgttcgtttcgttaaccgtcgggatatctgcctctttccgtcgtcgaaccgtttttttgtgaagctgacgttgagcttttgtctcttccagttccttcgagccatctcgatttgattcgctgattatttgttttttttattatctcaggaaaaaaaaaaaaaaaaaaaaaaaaaaaaaa

SEQ ID NO: 8306 - protein, 105 aa, Spadella cephaloptera
MAPKYAMAIGRVRDKGFRTTKHEAPVKPSRRKGVQHKHVKFVRELVREIGGFAPYEKRCLELLKVSKDKRCLKFAKKRLGAHIRGKRKREEMQSVLQAQRKAANK

SEQ ID NO: 8307 - DNA, 306 bp, Ostreococcus tauri
  CDS (1)..(306)
atgtcggttggtttggataagggtcacgctgttacgaagcgagagatcgcgccgagaccagggtcgagaaaggggcgttgtggcaaacgtgtcggcatgattcgctcgcttattcgagatgtcgctggttctgcgccgtacgaaaggcggttaatcgagttgctgaagaacggtcgggacaagcgcgcattgaaacttgcaaagagaaagcttgggactcacttgcgcggtaagaagaagcgcgaagaaatgggcaacatcatgcgcaagtcgtcgcgaaaagccacagccccggaaagcaagtga

SEQ ID NO: 8308 - protein, 101 aa, Ostreococcus tauri
MSVGLDKGHAVTKREIAPRPGSRKGRCGKRVGMIRSLIRDVAGSAPYERRLIELLKNGRDKRALKLAKRKLGTHLRGKKKREEMGNIMRKSSRKATAPESK

SEQ ID NO: 8309 - DNA, 318 bp, Artemia sanfranciscana
  CDS (1)..(318)
atggtgaagaaaaactttgatttggcagttggcttaaacaaaggtcataagactaccaagaatgtccaggccccaagaccttccagaaggataggcaaacagtcaaagcacaataagttcattaaaagtatagtgactgaagttgttgggcatgcaccgtatgagaaacgtgccatggagctgctgaaagtttccaaagataagagggcgctgaaattcctgaaaaagaggcttggtactcatattcgtgccaagaagaagagagaagaacttggaaatgtcctcacacaaatgcgtaaggcgcaagctgctaaataa

SEQ ID NO: 8310 - protein, 105 aa, Artemia sanfranciscana
MVKKNFDLAVGLNKGHKTTKNVQAPRPSRRIGKQSKHNKFIKSIVTEVVGHAPYEKRAMELLKVSKDKRALKFLKKRLGTHIRAKKKREELGNVLTQMRKAQAAK

SEQ ID NO: 8311 - DNA, 321 bp, Phaeosphaeria nodorum
  CDS (1)..(321)
atgccgaaggaagtcaagcagaagtccggcctcatcgtcggcctcaacgctggccacaaggtcaccccgaggacccccgcccccaggatctccaggaggaagggtttcctatccaagcgcaccgctttcgtccgcgagatcacccgtgaggtcgctggacttgccccatacgagaagcgtgtcatcgaattgctccgtaactccaaggacaagcgtgcccgtcgtcttgcgaagaagaggctcggtaccttcggtcgtgctaagaggaaggttgaggagatgaccaacgtcatcgccgagtcgaggcgtgcgggtcactaa

SEQ ID NO: 8312 - protein, 106 aa, Phaeosphaeria nodorum
MPKEVKQKSGLIVGLNAGHKVTPRTPAPRISRRKGFLSKRTAFVREITREVAGLAPYEKRVIELLRNSKDKRARRLAKKRLGTFGRAKRKVEEMTNVIAESRRAGH

SEQ ID NO: 8313 - DNA, 318 bp, Aspergillus oryzae
  CDS (1)..(318)
atggcccaggaacgctccggaattgtggtcggtctgaacaagggccataaaaccacccccctcaacacccccaagacccgtgtcagccgcaccaagggccagtcctcccgccgtactgcctttgttcgtgacatcgctcgtgaggttgtcggtcttgccccctatgagcgccgtatcatcgaactcctgagaaacactcaggacaagcgtgctcgtaagctcgccaagaagaggctcggtaccttcggccgtggaaagagaaaggttgaggacatgcagcgcgtcatcgctgagtcccgtcgtgtcactggtcactaa

SEQ ID NO: 8314 - protein, 105 aa, Aspergillus oryzae
MAQERSGIVVGLNKGHKTTPLNTPKTRVSRTKGQSSRRTAFVRDIAREVVGLAPYERRIIELLRNTQDKRARKLAKKRLGTFGRGKRKVEDMQRVIAESRRVTGH

SEQ ID NO: 8315 - DNA, 333 bp, Timarcha balearica
  CDS (1)..(333)
atggccccaaggtacgaaatagccgcgggtctgcaaaaaggccataaaactacgaaaatctctgaaaagtcgaagcttcataaagtccgtcccgccaggttgaaggggatccaaaccaaacatacgaaattcgttcgtgacctgatccgggaagttgtaggacatgctccatatgaaaagagagctatggagttgttgaaagtatccaaggataaaagggcgcttaaattcctcaaacgtcgtctaggtacgcacatccgtgccaagaggaagcgtgaagaattatccaatatccttacacagatgcgaaaggcacaagctacccataagtag

SEQ ID NO: 8316 - protein, 110 aa, Timarcha balearica
MAPRYEIAAGLQKGHKTTKISEKSKLHKVRPARLKGIQTKHTKFVRDLIREVVGHAPYEKRAMELLKVSKDKRALKFLKRRLGTHIRAKRKREELSNILTQMRKAQATHK

SEQ ID NO: 8317 - DNA, 336 bp, Cicindela littoralis
  CDS (1)..(336)
atggcaccgaggtacgaagtggcggtgggtctcaataagggccataaaacaacaaaaatccccgctggtaaaacaaaagcagacaaagtgagtccatccaggttgaaggggatccaaactaagcacaccaagttcgtgcgcgaattgatccgtgaggtttgtggtcatgctccatatgagaagcgcgctatggaattactgaaagtatcaaaagacaagcgtgcactcaagtttttgaagcgacgtcttggcacccacatccgtgcgaagaggaagcgtgaagaactgtccaacatcatcacccaaatgcgcaaggcacaagcacatgggaaataa

SEQ ID NO: 8318 - protein, 111 aa, Cicindela littoralis
MAPRYEVAVGLNKGHKTTKIPAGKTKADKVSPSRLKGIQTKHTKFVRELIREVCGHAPYEKRAMELLKVSKDKRALKFLKRRLGTHIRAKRKREELSNIITQMRKAQAHGK

SEQ ID NO: 8319 - DNA, 342 bp, Biphyllus lunatus
  CDS (1)..(342)
atggcccctaggtacgaaatagcggtgggcctccaaagaggccataaaacaactaaaatacccacgaagacaaacaaggaaggtaaacccattccaagacctgcaaggttgaaggggatccaaaccaaacactcaaaatttgtccgtgatctcattagagaagttgtaggacatgctccttacgaaaaaagagccatggaattgttgaaagtgtccaaggataagagggctttgaaattcttgaaacgtcgtcttggcacacacatccgtgccaaaaggaagcgtgaagaattatcaaacatccttacacaaatgcgtaaggctcaagctacccacaaataa

SEQ ID NO: 8320 - protein, 113 aa, Biphyllus lunatus
MAPRYEIAVGLQRGHKTTKIPTKTNKEGKPIPRPARLKGIQTKHSKFVRDLIREVVGHAPYEKRAMELLKVSKDKRALKFLKRRLGTHIRAKRKREELSNILTQMRKAQATHK

SEQ ID NO: 8321 - DNA, 333 bp, Ixodes scapularis
  CDS (1)..(333)
atgggggtgcagtacaaactcgccgtaggcctcggaaagggccacaaagtcacgaagaacgagtataagcctcggccttcgcgaaggaagggagcgctttctaagcacacccgcttcgtccgcgacctgatccgcgaggtgtgcggcttcgcgcctttcgaaaggcgggccatggagttgctcaaggtgtccaaggacaagcgtgccctcaagttcatcaagaagaggttgggcacccacctccgcggcaagaggaagagggacgagttgagcaacgtcctggtggcccagaggaaggcggccgcccacaaggagaagacggaacacaagtag

SEQ ID NO: 8322 - protein, 110 aa, Ixodes scapularis
MGVQYKLAVGLGKGHKVTKNEYKPRPSRRKGALSKHTRFVRDLIREVCGFAPFERRAMELLKVSKDKRALKFIKKRLGTHLRGKRKRDELSNVLVAQRKAAAHKEKTEHK

SEQ ID NO: 8323 - DNA, 351 bp, Lysiphlebus testaceipes
  CDS (1)..(351)
atggcacctaggtacgaaattgctgttggtctcaacaaaggtcacaagacctcaaaaattcgtgtagccaaaaccaaggctgaacaagctaaaactgttgctctcagaccagctcgtctcaagggacgtattaccaaacacaacaaatttgttcgtgatttggttcgtgaagtcactggacatgcaccatatgaaaaacgtgctatggaattgttgaaagtctcaaaagacaaacgtgctcttaaattcttgaaaagacgattgggtacacacattcgtgccaagaggaagcgtgaagaacttggaactgttcttgtccaaatgagaaaagcagcagcagctcatcattaa

SEQ ID NO: 8324 - protein, 116 aa, Lysiphlebus testaceipes
MAPRYEIAVGLNKGHKTSKIRVAKTKAEQAKTVALRPARLKGRITKHNKFVRDLVREVTGHAPYEKRAMELLKVSKDKRALKFLKRRLGTHIRAKRKREELGTVLVQMRKAAAAHH

SEQ ID NO: 8325 - DNA, 339 bp, Triticum aestivum
  CDS (1)..(339)
atggcgccgtcgcagcccaagtcagggctcttcgtgggcatcaacaagggccacgtcgtcaccaagcgcgagctgccgcctcgcccgtccgaccgcaaggggaaaggtacaaagagggtgcattttgtcaggaacttgatcagggaggttgctggatttgctccctatgagaagcgtatcactgagcttcttaaggttggaaaggacaagcgtgcactcaaggtcgccaagagaaagcttggtactcacaagagagcaaagaagaagagagaggagatgtcaagtgtccttaggaagatgaggtctgctggtggtggtgctggtgacaagaagaaatag

SEQ ID NO: 8326 - protein, 112 aa, Triticum aestivum
MAPSQPKSGLFVGINKGHVVTKRELPPRPSDRKGKGTKRVHFVRNLIREVAGFAPYEKRITELLKVGKDKRALKVAKRKLGTHKRAKKKREEMSSVLRKMRSAGGGAGDKKK

SEQ ID NO: 8327 - DNA, 336 bp, Saccharum officinarum
  CDS (1)..(336)
atggcgccgccgcagccgaagtcgggcctcttcgtgggcatcaacaagggccatgtcgtcaccaagcgcgagctgcctccgcgcccgtcccaccgcaaggggaaagcaacgaagagggtgtccatggtcaggggcctgatcagagaggttgctgggtttgctccttatgagaagcgtatcactgagcttcttaaggttggcaaggacaagcgtgctttgaaggttgccaagagaaagcttggaactcacaagagggcaaagaagaagagagaggagatggcgggtgtcctcaagaaaatgagatcggctggtacgcacactgacaagaagaaatag

SEQ ID NO: 8328 - protein, 111 aa, Saccharum officinarum
MAPPQPKSGLFVGINKGHVVTKRELPPRPSHRKGKATKRVSMVRGLIREVAGFAPYEKRITELLKVGKDKRALKVAKRKLGTHKRAKKKREEMAGVLKKMRSAGTHTDKKK

SEQ ID NO: 8329 - DNA, 357 bp, Plutella xylostella
  CDS (1)..(357)
atggctccgcggtttgaaatcgcagttggtctgcgtaaaggccacaaaactaccaagatctcagctggtagaaaaggcattacagacaaagccatcaaaatccgccccgccaggctaaagggtctgcaaaccaagcactccaagtttgtccgtgacctggtccgcgaggtcgtcggtcacgctcagtatgagaagagggctatggaattgttgaaggtctccaaggacaagcgcgccctgaagttcctgaagcgtcgcctgggcacccacatccgcgccaagaggaagcgtgaggagctcagcaacgttctcacacagatgaggaaggccgccgcccaggctcaccaccaccactaa

SEQ ID NO: 8330 - protein, 118 aa, Plutella xylostella
MAPRFEIAVGLRKGHKTTKISAGRKGITDKAIKIRPARLKGLQTKHSKFVRDLVREVVGHAQYEKRAMELLKVSKDKRALKFLKRRLGTHIRAKRKREELSNVLTQMRKAAAQAHHHH

SEQ ID NO: 8331 - DNA, 312 bp, Branchiostoma belcheri
  CDS (1)..(312)
atggggatcagatacgacatgtgtgtcggcctcaacaagggccataagatcaccaaaaatgtgcagaaaccacggccatctcgcaggaaagggaaactgacgaagcacgtgaagtttgttcgtgacctggtgcgagaggtgacaggctttgctccttacgaaagacgtaccatggagttgctgaaggtcagcaaggacaagcgggcgctcaagttcctgaagaaaagggttggaactctgcagcgtgccaagagaaagcgtgaggagatgcagaacgtcatcgctgcccagaggaaggctcaaagatcttag

SEQ ID NO: 8332 - protein, 103 aa, Branchiostoma belcheri
MGIRYDMCVGLNKGHKITKNVQKPRPSRRKGKLTKHVKFVRDLVREVTGFAPYERRTMELLKVSKDKRALKFLKKRVGTLQRAKRKREEMQNVIAAQRKAQRS

SEQ ID NO: 8333 - DNA, 369 bp, Spodoptera frugiperda
  CDS (1)..(369)
atggctcctcgatttgagttagcggtcggtctccgaaagggacacaaaacacttaaaatctccgctggcaagaagggtattactgacaaagccatcaaaatcaggcctgctaggctaaagggtctccaaaccaagcactcaaaattcgtgcgcgatttggtccgtgaggtcgttggacacgctcagtatgagaagagggctatggaattgttgaaggtgtcaaaagacaagcgcgccctgaagttcttgaagcgtcgtctgggcacacacatccgtgccaagaggaagcgtgaagagctgagcaacgtactgacacagatgaggaaggcggccgcacaagcacaccacgcccctacacacactaagtga

SEQ ID NO: 8334 - protein, 122 aa, Spodoptera frugiperda
MAPRFELAVGLRKGHKTLKISAGKKGITDKAIKIRPARLKGLQTKHSKFVRDLVREVVGHAQYEKRAMELLKVSKDKRALKFLKRRLGTHIRAKRKREELSNVLTQMRKAAAQAHHAPTHTK

SEQ ID NO: 8335 - DNA, 342 bp, Arabidopsis thaliana
  CDS (1)..(342)
atgacaactccagcagtgaagaccggtttgttcgttggattgaacaaaggacacgtcgtcaccagacgtgagctagctcctcgtcccaattctcgcaaagggaaaacgagcaagaggaccatattcataagaaaactgattagggaagtagctggaatggctccttatgagaagagaatcactgagcttctcaaggttgggaaagacaagcgtgctcttaaggttgctaagaggaagttgggtactcacaagagagctaagaggaagagagaggagatgtctagtgttctccgcaagatgaggtctcttggtggtgctgctgctgctgagaagaagatgtag

SEQ ID NO: 8336 - protein, 113 aa, Arabidopsis thaliana
MTTPAVKTGLFVGLNKGHVVTRRELAPRPNSRKGKTSKRTIFIRKLIREVAGMAPYEKRITELLKVGKDKRALKVAKRKLGTHKRAKRKREEMSSVLRKMRSLGGAAAAEKKM

SEQ ID NO: 8337 - DNA, 339 bp, Arabidopsis thaliana
  CDS (1)..(339)
atgacaactccacaagtgaagaccggtttgttcgttgggttgaacaagggacatgttgttaccagacgtgaattagctcctcgtcctcgttctcgcaaaggaaaaacgagcaagaggacaatctttatcagaaacttgataaaggaagttgctggtcaagctccctatgagaagagaatcactgagcttttgaaggttggtaaagacaaacgtgctcttaaggttgctaagaggaagttgggaacccacaagagagccaagcgaaagagagaggagatgtccagtgttctccgcaagatgaggtctggcggtggtggtgcaactgagaagaagaagtga

SEQ ID NO: 8338 - protein, 112 aa, Arabidopsis thaliana
MTTPQVKTGLFVGLNKGHVVTRRELAPRPRSRKGKTSKRTIFIRNLIKEVAGQAPYEKRITELLKVGKDKRALKVAKRKLGTHKRAKRKREEMSSVLRKMRSGGGGATEKKK

SEQ ID NO: 8339 - DNA, 327 bp, Arabidopsis thaliana
  CDS (1)..(327)
atggtggcgacaggcttattcgtggggctaaacaaaggacacgttgttaccaaacgcgagcaacctcctcgccctaacaacagaaaagggaaaacaagcaaaaggactatttttatcaggaatctcatcaaggaagttgcgggtcaagctccctatgagaagaggatcactgagcttttgaaggttggtaaagacaagagagctcttaaagttgccaagcgaaagttgggaactcacaagagagctaaacgaaagagagaggagatgtccagtgttctccgcaagatgaggtctggtggtgctggtgcatccgagaagaagaagtga

SEQ ID NO: 8340 - protein, 108 aa, Arabidopsis thaliana
MVATGLFVGLNKGHVVTKREQPPRPNNRKGKTSKRTIFIRNLIKEVAGQAPYEKRITELLKVGKDKRALKVAKRKLGTHKRAKRKREEMSSVLRKMRSGGAGASEKKK

SEQ ID NO: 8341 - DNA, 300 bp, Schizosaccharomyces pombe
  CDS (1)..(300)
atggcacctggtctggttgttggtttaaacaaaggaaaggttttgaccaagcgtcaacttcctgagcgtccttctcgccgtaagggacaattgtccaagcgtacttcttttgtccgttctatcgttcgtgaggttgctggattcgctccctatgagcgtcgtgtcatggaattgatccgtaactcccaagacaagcgtgcccgcaaattggccaagaagaggctcggtacccttaagcgtgccaagggaaagattgaagagcttacctctgtcatccaaagctctcgtttggctcactaa

SEQ ID NO: 8342 - protein, 99 aa, Schizosaccharomyces pombe
MAPGLVVGLNKGKVLTKRQLPERPSRRKGQLSKRTSFVRSIVREVAGFAPYERRVMELIRNSQDKRARKLAKKRLGTLKRAKGKIEELTSVIQSSRLAH

SEQ ID NO: 8343 - DNA, 303 bp, Saccharomyces cerevisiae
  CDS (1)..(303)
atgaccgttaagacaggaattgctattggtttaaacaaaggtaagaaggtcactagcatgaccccagctccaaaaatctcttacaagaaaggtgctgcttccaacagaaccaagttcgtaagatctttggtcagagaaatcgctggtttgtctccatacgaaagaagattgattgatctaataagaaactctggtgaaaagagagctagaaaggtcgccaagaagagattgggttctttcaccagagccaaggctaaggtcgaagaaatgaacaacatcattgctgcttctcgtcgtcactaa

SEQ ID NO: 8344 - protein, 100 aa, Saccharomyces cerevisiae
MTVKTGIAIGLNKGKKVTSMTPAPKISYKKGAASNRTKFVRSLVREIAGLSPYERRLIDLIRNSGEKRARKVAKKRLGSFTRAKAKVEEMNNIIAASRRH

SEQ ID NO: 8345 - DNA, 300 bp, Schizosaccharomyces pombe
  CDS (1)..(300)
atggcacctggactggttgttggtttaaacaagggaaagactttgactaagcgtcaacttcctgagcgtccttctcgccgcaagggacatttgtccaagcgtactgctttcgtccgatctattgtgcgtgaagttgctggatttgctccttatgaacgccgtgtcatggaattgatccgtaactcccaagacaagcgtgctcgcaagcttgccaagaagagactcggtactttgaagcgtgccaagggtaaaatcgaagagctcactagtgtcatccagagctccagattggcccattaa

SEQ ID NO: 8346 - protein, 99 aa, Schizosaccharomyces pombe
MAPGLVVGLNKGKTLTKRQLPERPSRRKGHLSKRTAFVRSIVREVAGFAPYERRVMELIRNSQDKRARKLAKKRLGTLKRAKGKIEELTSVIQSSRLAH

SEQ ID NO: 8347 - DNA, 300 bp, Candida albicans
  CDS (1)..(300): transl_table=12
atggctaagtcaggaattgctgcaggtgttaacaaaggtagaaaaactactgccaaagaagttgccccaaaaatctcatacagaaaaggtgcttcatctcaaagaaccgttttcgttagatcaatcgtcaaagaagttgctggtttagctccatacgaaagaagattgattgaattgattagaaatgctggtgaaaagagagctaagaaattggctaagaagagattaggtactcataagagagctttaagaaaagttgaagaaatgactcaagttattgctgaatctagaagacattaa

SEQ ID NO: 8348 - protein, 99 aa, Candida albicans
MAKSGIAAGVNKGRKTTAKEVAPKISYRKGASSQRTVFVRSIVKEVAGLAPYERRLIELIRNAGEKRAKKLAKKRLGTHKRALRKVEEMTQVIAESRRH

SEQ ID NO: 8349 - DNA, 348 bp, Drosophila melanogaster
  CDS (1)..(348)
atggcagtgcgctacgagctggctattggcctgaacaagggccacaagacctcgaagatcaggaatgtgaagtacaccggcgacaagaaggtcaagggtctgcgcggatcgcgcttgaagaacatccaaacccgccacaccaagttcatgcgcgacttggtccgcgaggtcgttggccacgctccctatgagaagcgcaccatggagttgctgaaggtgtccaaggataagagggccctgaagttcctcaagcgccgcctgggcacccacatccgtgccaagaggaagcgtgaggagttgtccaacatcctcacccagctgaggaaggcccagacccacgccaagtaa

SEQ ID NO: 8350 - protein, 115 aa, Drosophila melanogaster
MAVRYELAIGLNKGHKTSKIRNVKYTGDKKVKGLRGSRLKNIQTRHTKFMRDLVREVVGHAPYEKRTMELLKVSKDKRALKFLKRRLGTHIRAKRKREELSNILTQLRKAQTHAK

SEQ ID NO: 8351 - DNA, 306 bp, Enteromorpha compressa
  CDS (1)..(306)
atgggggagatcgctgtaggcctcaacaagggtcaccaggtgacaaagaaggctggcacaccccggccttcaaggagaaagggattcttgtcacaacgtgtcaagaaggtcagggcagttgtccgtgaggttgctggctgggcaccatatgagcgtcgcgtgatggagctcttgaaggttggtaaggacaagcgtgctttgaagatgtgcaagcgcaaattgggcacacacatgcgcggcaagaagaagagggaggagatggctggtgttctccgtaagatgcaggctgccagcaagggagagtag

SEQ ID NO: 8352 - protein, 101 aa, Enteromorpha compressa
MGEIAVGLNKGHQVTKKAGTPRPSRRKGFLSQRVKKVRAVVREVAGWAPYERRVMELLKVGKDKRALKMCKRKLGTHMRGKKKREEMAGVLRKMQAASKGE

SEQ ID NO: 8353 - DNA, 318 bp, Trichoderma hamatum
  CDS (1)..(318)
atggctaaggaagcgcctgcaaagaccggtctggccgttggcctgaacaagggccacaagactaccgctcgtgtcgtcaagccccgtgtttcccgcaccaagggacacctgagcaagcgcaccgcctttgttcgtgaggtcgtcaaggaggttgctggcctcgctccctatgagcgtcgtgttatcgaacttctccgcaacagcaaggacaagcgtgcccgtaagctggccaagaagaggctcggtacctttggccgtgccaagagaaaggtcgatgagctccagcgcgtcatcgccgagtcccgtcgtgctcactaa

SEQ ID NO: 8354 - protein, 105 aa, Trichoderma hamatum
MAKEAPAKTGLAVGLNKGHKTTARVVKPRVSRTKGHLSKRTAFVREVVKEVAGLAPYERRVIELLRNSKDKRARKLAKKRLGTFGRAKRKVDELQRVIAESRRAH

SEQ ID NO: 8355 - DNA, 333 bp, Oryza sativa
  CDS (1)..(333)
atggcgccgccgcagcccaagtcggggctcttcgtcggcatcaacaagggccacgtcgtcaccaagcgcgagctgccacctcgcccgtccgaccgcaaggggaaaagtaccaagagagtgaattttgtcaggggcttgattagggaggttgtgggatttgctccatatgagaaacgaatcactgagcttctgaaggttggaaaggacaagcgtgcactgaaggtcgctaagagaaagctcggtacccacaagagagcaaagaagaagagagaggagatggcgggtgtcatcaggaagatgaggtctgctggtactactgacaagaagaaatag

SEQ ID NO: 8356 - protein, 110 aa, Oryza sativa
MAPPQPKSGLFVGINKGHVVTKRELPPRPSDRKGKSTKRVNFVRGLIREVVGFAPYEKRITELLKVGKDKRALKVAKRKLGTHKRAKKKREEMAGVIRKMRSAGTTDKKK

SEQ ID NO: 8357 - DNA, 342 bp, Oryza sativa
  CDS (1)..(342)
atggcgccgtcgcagccgaagtccgggctcttcgtgggcatcaacaagggccacgtcgtcaccaagcgcgagctgccgcctcgcccgtccgaccgcaaggggaaatccaccaagagggtgacctttgtcaggaacttgatcagggaggttgctggatttgctccctatgagaagcgtatcactgagcttctcaaagttggcaaggacaagcgtgcactgaaggtggcaaagagaaagcttggcacccacaagagggccaagaagaagagagaggagatggctggtgtcctcaggaagatgaggtctggtggcggtcacgctcacaccgagaagaagaaatag

SEQ ID NO: 8358 - protein, 113 aa, Oryza sativa
MAPSQPKSGLFVGINKGHVVTKRELPPRPSDRKGKSTKRVTFVRNLIREVAGFAPYEKRITELLKVGKDKRALKVAKRKLGTHKRAKKKREEMAGVLRKMRSGGGHAHTEKKK

SEQ ID NO: 8359 - DNA, 324 bp, Oryza sativa
  CDS (1)..(324)
atggcgccgtcgcagccgaagtccgggctcttcgtgggcatcaacaagggccacgtcgtcaccaagcgcgagctgccgcctcgcccgtccgaccgcaaggggaaatccaccaagagggtgacctttgtcaggaacttgatcagggaggttgctggatttgctccctatgagaagcgtatcactgagcttctcaaagttggcaaggacaagcgtgcactgaaggtggcaaagagaaagcttggcacccacaagagggccaagaagaagagagaggagatggctggtgtcctcaggaagatgaggtgtgtaatcttccagccttga

SEQ ID NO: 8360 - protein, 107 aa, Oryza sativa
MAPSQPKSGLFVGINKGHVVTKRELPPRPSDRKGKSTKRVTFVRNLIREVAGFAPYEKRITELLKVGKDKRALKVAKRKLGTHKRAKKKREEMAGVLRKMRCVIFQP

SEQ ID NO: 8361 - DNA, 348 bp, Brassica napus
  CDS (1)..(348)
atgacagctcctcaagtgaagaccggtttgttcgtggggttgaacaagggacatgttgtcaccagacgcgagttggctcctcgtccccgtgctcgcaaaggacaaacgagcaagaggacactctttatcagatcattgataagggaagttgccggttttgctccctacgagaagagaatcactgagcttcttaaggttggtaaagacaaacgtgctctcaaggtggctaagcgaaagttgggaacacacaagagagccaagaggaagagagaggagatgtctagcgttctccgcaagatgaggtctggtggtggtggtggtggcggtgctactgagaagaagaagtga

SEQ ID NO: 8362 - protein, 115 aa, Brassica napus
MTAPQVKTGLFVGLNKGHVVTRRELAPRPRARKGQTSKRTLFIRSLIREVAGFAPYEKRITELLKVGKDKRALKVAKRKLGTHKRAKRKREEMSSVLRKMRSGGGGGGGATEKKK

SEQ ID NO: 8363 - DNA, 339 bp, Brassica napus
  CDS (1)..(339)
atgacaactccgcaagtaaagaccggtttgtttgtcggtttgaacaagggacatgttgtcaccagacgcgagttggctcctcgtccccgtgctcgcaaaggaaaaacaagcaagaggacacttttcatcagatctttgatcagggaagttgctggttttgctccctacgagaagagaatcactgagcttctaaaggttggtaaagacaagcgtgctcttaaggtggctaagcgaaagttgggtacccacaagagagccaagaggaagagagaggtgatgtctagcgtcctccgcaagatgaggtctggtggtggtggtgtaaccgagaagaagaaatga

SEQ ID NO: 8364 - protein, 112 aa, Brassica napus
MTTPQVKTGLFVGLNKGHVVTRRELAPRPRARKGKTSKRTLFIRSLIREVAGFAPYEKRITELLKVGKDKRALKVAKRKLGTHKRAKRKREVMSSVLRKMRSGGGGVTEKKK

SEQ ID NO: 8365 - DNA, 339 bp, Brassica napus
  CDS (1)..(339)
atggcagcaccacaagtgaagactggtttgttcgttggtctgaacaaaggacacgttgtcaccagacgcgagttggctcctcgtcctaactctcgcaaagggaaaacgagcaagaggacgttgttcatcaggtcactgatcagagaagttgctggatttgctccctacgagaagagaatcactgagcttctcaaggttggtaaagacaagagggctcttaaggttgctaagaggaagttgggtacccacaagagagccaagaggaagagagaggagatgtctagtgttctccgcaagatgaggtctggtggaggtgctactactgagaagaagaagtaa

SEQ ID NO: 8366 - protein, 112 aa, Brassica napus
MAAPQVKTGLFVGLNKGHVVTRRELAPRPNSRKGKTSKRTLFIRSLIREVAGFAPYEKRITELLKVGKDKRALKVAKRKLGTHKRAKRKREEMSSVLRKMRSGGGATTEKKK

SEQ ID NO: 8367 - DNA, 333 bp, Linum usitatissimum
  CDS (1)..(333)
atggctcctgctcaggcgaagagtggtctgttcgtcggactgaacaaaggacacatcgtcactaagcgcgagctgccacctcgtccttccgatagaaaggggaaaacaagcaagagggtgcaccttgtgaggaaccttatcagggaagtagctggttttgctccatatgagaagagagttattgagctcctgaaggttggaaaggacaagcgagctctgaaactttctaagagaaagctcggtacccacaagaggggcaagaagaagagagaggagctggccaccgcactccgcaagatgagggctgcaggaggaggcgagaagaagaagtga

SEQ ID NO: 8368 - protein, 110 aa, Linum usitatissimum
MAPAQAKSGLFVGLNKGHIVTKRELPPRPSDRKGKTSKRVHLVRNLIREVAGFAPYEKRVIELLKVGKDKRALKLSKRKLGTHKRGKKKREELATALRKMRAAGGGEKKK

SEQ ID NO: 8369 - DNA, 336 bp, Zea mays
  CDS (1)..(336)
atggcgccgccgcagccaaagtcgggcctcttcgttggcatcaacaagggtcatgtcgtcaccaagcgcgagctgcctccccgcccgtgccaccgcaaggggaaatcaacgaagagggtgtctatggtcaggggcctgatcagagaggttgctgggtttgctccttatgagaagcgtatcactgagcttctgaaggttggcaaggacaagcgtgccctgaagcttgctaagagaaagcttggaactcacaagagggcaaagaagaagagagaggagatggcgggcgtcctcaggaagatgaggtcggctggtacgcacactgacaagaagaaatag

SEQ ID NO: 8370 - protein, 111 aa, Zea mays
MAPPQPKSGLFVGINKGHVVTKRELPPRPCHRKGKSTKRVSMVRGLIREVAGFAPYEKRITELLKVGKDKRALKLAKRKLGTHKRAKKKREEMAGVLRKMRSAGTHTDKKK

SEQ ID NO: 8371 - DNA, 342 bp, Hordeum vulgare
  CDS (1)..(342)
atggcgccgtcgcagcccaagtcagggctcttcgtgggcatcaacaagggccacgtcatcaccaagcgcgagctgccgccccgcccgtccgaccgcaaggggaaaggcacaaagagggtgcattttgtcaggaacttgatcagggaggttgctggattcgctccatatgagaaacgcatcactgagcttcttaaggttggaaaggacaagcgtgcactcaaggtcgccaagagaaagcttggtactcacaagagagcaaagaagaagagagaggagatgtcaagtgtcctgaggaagatgaggtctgctggtggtggtggtgctggtgacaagaagaaatag

SEQ ID NO: 8372 - protein, 113 aa, Hordeum vulgare
MAPSQPKSGLFVGINKGHVITKRELPPRPSDRKGKGTKRVHFVRNLIREVAGFAPYEKRITELLKVGKDKRALKVAKRKLGTHKRAKKKREEMSSVLRKMRSAGGGGAGDKKK

SEQ ID NO: 8373 - DNA, 333 bp, Helianthus annuus
  CDS (1)..(333)
atggcgcccaagcagcctaacacaggcctctttgttggattgaacaagggccatgttgtcaccaagaaggagttggcccctcgtccatctgacaggaaaggcaaaacaagcaaaagggttcattttgtgaggagtttgatccgtgaagtagctggatttgcgccatatgagaagaggattactgagctgttgaaggttggaaaggacaagcgggcattgaaggtggctaagagaaagttgggcacccacaagagggcaaagaagaagagagaggagatgtccagcgttctccgcaagatgagagctggtggaggtgcagaaaagaagaagtga

SEQ ID NO: 8374 - protein, 110 aa, Helianthus annuus
MAPKQPNTGLFVGLNKGHVVTKKELAPRPSDRKGKTSKRVHFVRSLIREVAGFAPYEKRITELLKVGKDKRALKVAKRKLGTHKRAKKKREEMSSVLRKMRAGGGAEKKK

SEQ ID NO: 8375 - DNA, 339 bp, Brassica napus
  CDS (1)..(339)
atggcaacaccacaagtgaagactggtttgttcgttggtctgaacaaaggacacgtcgtcaccagacgcgagttggctcctcgtcctaactctcgcaaagggaaaacgagcaagaggacattgttcatcagatcactgatcagggaagttgctggatttgctccttacgagaagagaatcactgagcttctcaaggttggtaaagacaagagggctcttaaggttgctaagaggaagttgggcacccacaagagagccaagcgaaagagagaggagatgtctagtgttctccgcaagatgaggtctggtggaggtgctactactgagaagaagaaataa

SEQ ID NO: 8376 - protein, 112 aa, Brassica napus
MATPQVKTGLFVGLNKGHVVTRRELAPRPNSRKGKTSKRTLFIRSLIREVAGFAPYEKRITELLKVGKDKRALKVAKRKLGTHKRAKRKREEMSSVLRKMRSGGGATTEKKK

SEQ ID NO: 8377 - DNA, 339 bp, Brassica napus
  CDS (1)..(339)
atgacagctcctcaagtgaagaccggtttgttcgtggggttgaacaagggacatgttgtcaccagacgcgagctggctcctcgtccccgtgctcgcaaaggacaaacgagcaagaggacactctttatcagatccttgataagggaagttgccggttttgccccctacgagaagagaatcactgagcttttaaaggttggtaaagacaagcgtgctctcaaggtggctaagcgaaagttgggaacccacaagagagccaagaggaagagagaggagatgtctagcgttctccgcaagatgaggtctggtggtggtggtgctactgagaagaagaaatga

SEQ ID NO: 8378 - protein, 112 aa, Brassica napus
MTAPQVKTGLFVGLNKGHVVTRRELAPRPRARKGQTSKRTLFIRSLIREVAGFAPYEKRITELLKVGKDKRALKVAKRKLGTHKRAKRKREEMSSVLRKMRSGGGGATEKKK

SEQ ID NO: 8379 - DNA, 339 bp, Brassica napus
  CDS (1)..(339)
atggcagcaccacaagtaaagactggtctgttcgtggggttgaacaaaggacacgtgacgacaagacgcgagctagctcctcgtcccaactctcgcaaagggaaaacgagcaagaggacactgttcatcagatctttgatcagggaagttgctggattcgctccttacgagaagagaatcactgagcttctcaaggttggtaaagacaagagggctctcaaggttgccaagaggaagttgggtactcacaagagagccaagcgaaagagagaggagatgtctagtgttctccgcaagatgaggtctggtggtggtggtgttactgagaagaagaagtaa

SEQ ID NO: 8380 - protein, 112 aa, Brassica napus
MAAPQVKTGLFVGLNKGHVTTRRELAPRPNSRKGKTSKRTLFIRSLIREVAGFAPYEKRITELLKVGKDKRALKVAKRKLGTHKRAKRKREEMSSVLRKMRSGGGGVTEKKK

SEQ ID NO: 8381 - DNA, 339 bp, Brassica napus
  CDS (1)..(339)
atgacaactccgcaagtaaagaccggtttgtttgtcggtttgaacaagggacatgttgtcaccagacgcgagttggctcctcgtccccgtgctcgcaaaggaaaaacaagcaagaggacacttttcatcagatctttgatcagggaagttgctggttttgctccctacgagaagagaatcactgagcttctaaaggttggtaaagacaagcgtgctcttaaggtggctaagcgaaagttgggtacccacaagagagccaagaggaagagagaggagatgtctagcgtcctccgcaagatgaggtctggtggtggtggtgtaaccgagaagaagaaatga

SEQ ID NO: 8382 - protein, 112 aa, Brassica napus
MTTPQVKTGLFVGLNKGHVVTRRELAPRPRARKGKTSKRTLFIRSLIREVAGFAPYEKRITELLKVGKDKRALKVAKRKLGTHKRAKRKREEMSSVLRKMRSGGGGVTEKKK

SEQ ID NO: 8383 - DNA, 333 bp, Glycine max
  CDS (1)..(333)
atggctcccaaacatcttagtacgggtttgtttgttggattgaacaagggtcacgttgtcaccaagaaggagttgcctccacgcccttcagatcgtaaggggaaaacaagcaagcgagtgcactttgtgaggaacctcattcgagaggttgccggctttgcaccttatgaaaagcgaataactgagttgctcaaggttggaaaagataagagggcactgaaagttgccaagagaaagcttggaacccataagcgcgcaaagaagaagagagaggagatgtccaatgttctccggaagatgagggctggtggagctggagacaagaagaaataa

SEQ ID NO: 8384 - protein, 110 aa, Glycine max
MAPKHLSTGLFVGLNKGHVVTKKELPPRPSDRKGKTSKRVHFVRNLIREVAGFAPYEKRITELLKVGKDKRALKVAKRKLGTHKRAKKKREEMSNVLRKMRAGGAGDKKK

SEQ ID NO: 8385 - DNA, 336 bp, Zea mays
  CDS (1)..(336)
atggcgccgccgcagccgaagtcgggcctcttcgtgggcatcaacaagggccatgtcgtcaccaagcgcgagctgcctctgcgcccgtcccaccgcaaggggaaagcaacgaagagggtgtccatggtcaggggcctgatcagagaggttgctggctttgctccttatgagaagcgtatcaccgagcttctgaaggttggcaaggacaagcgcgctctgaagcttgccaagagaaagcttggaactcacaagagggcaaagaagaagagagaggagatgatgggcgtcctcaggaagatgagatcggctggtacgcacactgacaagaagaaataa

SEQ ID NO: 8386 - protein, 111 aa, Zea mays
MAPPQPKSGLFVGINKGHVVTKRELPLRPSHRKGKATKRVSMVRGLIREVAGFAPYEKRITELLKVGKDKRALKLAKRKLGTHKRAKKKREEMMGVLRKMRSAGTHTDKKK

SEQ ID NO: 8387 - DNA, 336 bp, Zea mays
  CDS (1)..(336)
atggcgccgcagcagccgaagtcgggcctcttcgtgggcatcaacaagggccatgtcgtcacaaagcgcgagctgcctctgcgcccgtcccaccgcaaggggaaagcaacgaagagggtgtccatggtaaggggcctgataagagaggttgctggctttgctccttatgagaagcgtatcaccgagcttctgaaggttggcaaggaaaagcgcgctctgaagcttgccaagagaaagcttggaactcacaagagggcaaagaagaagagagaggagatgatgggcgtcctcaggaagatgagatcggctggtacgaaaactgacaagaagaaataa

SEQ ID NO: 8388 - protein, 111 aa, Zea mays
MAPQQPKSGLFVGINKGHVVTKRELPLRPSHRKGKATKRVSMVRGLIREVAGFAPYEKRITELLKVGKEKRALKLAKRKLGTHKRAKKKREEMMGVLRKMRSAGTKTDKKK

SEQ ID NO: 8389 - DNA, 336 bp, Zea mays
  CDS (1)..(336)
atggcgccgccgcaaccaaagtcgggccttttcgttggcatcaacaagggtcatgtcgtcgccaagcacgagctgcctccccgcccgtgcccccgcaaggggaaatcaacgaagagggtgtctatggtcaggggcctgatcagagaggttgctgggtttgctccttatgagaagcgtatcactgagcttctgaaggttggcaaggacaagcgtgccctgaagcttgctaagagaaagcttggaactcccaagagggcaaagaagaagagagaggagatggcgggcgtcctcaggaagatgaggtcggctggtacgcacactgacaaaaagaaatag

SEQ ID NO: 8390 - protein, 111 aa, Zea mays
MAPPQPKSGLFVGINKGHVVAKHELPPRPCPRKGKSTKRVSMVRGLIREVAGFAPYEKRITELLKVGKDKRALKLAKRKLGTPKRAKKKREEMAGVLRKMRSAGTHTDKKK

SEQ ID NO: 8391 - DNA, 336 bp, Zea mays
  CDS (1)..(336)
atggcgcccccgcaaccaaagtcgggccttttcgttggcatcgacaagggtcatgtcgtcaccaagcgcgagctgcctccccgcccgtgccaccgcaaggggaaatcaacgaagagggtgtctatggtcaggggcctgatcagagaggttgctgggtttgctccttatgagaagcgtatcactgagcttctgaaggttggcaaggacaagcgtgccctgaagcttgctaagagaaagcttggaactcacaagagggcaaagaagaagagagaggagatggcgggcgtcctcaggaagatgaggtcggctggtacgcacactgacaaaaagaaatag

SEQ ID NO: 8392 - protein, 111 aa, Zea mays
MAPPQPKSGLFVGIDKGHVVTKRELPPRPCHRKGKSTKRVSMVRGLIREVAGFAPYEKRITELLKVGKDKRALKLAKRKLGTHKRAKKKREEMAGVLRKMRSAGTHTDKKK

SEQ ID NO: 8393 - DNA, 24 bp, Artificial sequence
  primer
atggctgtcaagactggtatcgct

SEQ ID NO: 8394 - DNA, 24 bp, Artificial sequence
  primer
ttaatgacgacgagaggcagcaat

SEQ ID NO: 8395 - protein, 119 aa, Artificial sequence
  consensus sequence
  Variant (2)..(8): Xaa in position 2 to 8 is any amino acid
  Variant (9)..(15): Xaa in position 9 to 15 is any or no amino acid
  Variant (18)..(18): Xaa in position 18 is any amino acid
  Variant (19)..(20): Xaa in position 19 to 20 is any or no amino acid
  Variant (25)..(26): Xaa in position 25 to 26 is any amino acid
  Variant (28)..(33): Xaa in position 28 to 33 is any amino acid
  Variant (34)..(45): Xaa in position 34 to 45 is any or no amino acid
  Variant (48)..(49): Xaa in position 48 to 49 is any amino acid
  Variant (50)..(50): Xaa in position 50 is any or no amino acid
  Variant (53)..(54): Xaa in position 53 to 54 is any amino acid
  Variant (55)..(55): Xaa in position 55 is any or no amino acid
  Variant (57)..(59): Xaa in position 57 to 59 is any amino acid
  Variant (61)..(61): Xaa in position 61 is any amino acid
  Variant (63)..(65): Xaa in position 63 to 65 is any amino acid
  Variant (69)..(69): Xaa in position 69 is any amino acid
  Variant (71)..(71): Xaa in position 71 is any amino acid
  Variant (76)..(76): Xaa in position 76 is any amino acid
  Variant (78)..(79): Xaa in position 78 to 79 is any amino acid
  Variant (83)..(84): Xaa in position 83 to 84 is any amino acid
  Variant (85)..(85): Xaa in position 85 is any or no amino acid
  Variant (91)..(91): Xaa in position 91 is any amino acid
  Variant (93)..(93): Xaa in position 93 is any amino acid
  Variant (94)..(94): Xaa in position 94 is any or no amino acid
  Variant (96)..(97): Xaa in position 96 to 97 is any amino acid
  Variant (101)..(102): Xaa in position 101 to 102 is any amino acid
  Variant (106)..(106): Xaa in position 106 is any amino acid
  Variant (108)..(108): Xaa in position 108 is any amino acid
  Variant (111)..(118): Xaa in position 111 to 118 is any amino acid
MXXXXXXXXXXXXXXVGXXXNKGHXXTXXXXXXXXXXXXXXXXXXRPXXXKGXXXKXXXFXRXXXREVXGXAPYEXRXXELLXXXKDKRAXKXXKXXLGTXXRAKXKXEEXXXXXXXXR

SEQ ID NO: 8396 - protein, 29 aa, Artificial sequence
  protein pattern
  Variant (2)..(2): Xaa in position 2 is any amino acid
  Variant (3)..(6): Xaa in position 3 to 6 is any or no amino acid
  Variant (7)..(7): Xaa in position 7 is Ile or Val
  Variant (8)..(8): Xaa in position 8 is Ala, Ser, Thr or Val
  Variant (10)..(10): Xaa in position 10 is any amino acid
  Variant (11)..(11): Xaa in position 11 is Ala or Ser
  Variant (15)..(15): Xaa in position 15 is Lys or Arg
  Variant (17)..(18): Xaa in position 17 to 18 is any amino acid
  Variant (19)..(19): Xaa in position 19 is Glu or Asp
  Variant (21)..(21): Xaa in position 21 is Ile or Leu
  Variant (22)..(22): Xaa in position 22 is Lys or Arg
  Variant (23)..(23): Xaa in position 23 is Asn or Val
  Variant (24)..(24): Xaa in position 24 is Ala, Gly or Ser
  Variant (25)..(25): Xaa in position 25 is any amino acid
  Variant (26)..(26): Xaa in position 26 is Asp or Glu
RXXXXXXXGXXPYEXRXXXLXXXXXXKRA

SEQ ID NO: 8397 - DNA, 2217 bp, Saccharomyces cerevisiae
  CDS (1)..(2217)
atggttgccgaagaggacatcgagaagcaagtccttcaattgatagacagcttttttctgaagactacactactaatatgctccaccgaatcaagtcgataccagtcttctacagaaaatatattcctatttgacgacacatggtttgaagatcactcagaattagtgagtgagctacccgagataatatcaaaatggtctcactacgatggtcgaaaagagttgccacccttagtggtagagacatatttggatttaagacagttaaactcgtctcatttagttagattaaaggaccacgaaggccatttgtggaacgtttgcaaaggaactaagaagcaggaaatcgtgatggaacgttggcttatcgaattagataattcatccccaactttcaaatcatacagtgaagatgagactgatgttaatgaactttctaaacagctagtccttctcttccgttatttgttgactttaatacagttactacccacaacagaattataccaattattaataaagtcttataacggcccgcaaaatgaaggaagttccaatccaataacttccacgggcccactagtaagtatccggacgtgtgtccttgacggatctaaaccaattttatcgaaggggagaatagggttgagcaaaccgattattaatacatattccaatgcgcttaacgaatcaaacctgccagcccatttagatcaaaagaagatcacacctgtatggacaaagtttggactcttaagagtctcggtatcatacagacgtgattggaagtttgaaattaacaatacaaacgacgaattattttcagctcgacatgcatctgtctcacataactcacaaggaccccagaatcagccagaacaagaaggacaaagtgatcaagacatagggaaacgccaaccacaatttcaacagcagcagcagccccaacagcagcagcagcagcagcaacagcaacagagacaacaccaggtccagacacaacaacaaagacagatacctgataggagatctctttcactttctccttgtacaagagccaattcttttgaaccacaatcttggcagaagaaagtctatccaatatcgagacctgttcaaccatttaaagttggttcaattggaagtcaaagtgcgagcagaaatccctctaattcatcgtttttcaaccaaccacctgttcataggccaagtatgagctccaactacgggccacaaatgaatattgaaggtaccagtgttggaagcacctcaaagtattcctcctcctttgggaacattcgtcgtcactcaagtgtaaagacgacagagaatgctgaaaaagtatcaaaagctgtaaagagcccactacaacctcaagaatcacaagaagatttaatggattttgttaaattactcgaagaaaaacccgatctaactataaagaagacaagtggaaataatccacccaatatcaatatttctgattctctaatcagatatcagaatttgaagccaagtaatgacttattaagtgaagatttatccgtaagtttatccatggatccaaatcatacatatcacagaggcagatcagattcccactcaccattgccttcaatatccccttcgatgcattatggatcgttgaactcgagaatgtctcaaggcgccaatgcaagccatttgattgcaagaggcggtgggaattcatctactagtgccttgaatagtagaaggaattctttagataagagctcaaacaagcagggtatgtcaggcttacctcctatttttggtggagagagtacttcatatcaccacgacaacaaaatacaaaagtacaaccaattaggagtagaagaagatgatgatgacgagaatgaccgtttgctcaaccaaatgggaaacagtgctacaaaattcaaaagttcaatatctccaagatcaattgatagcatttcaagttctttcataaaaagtaggatacctatcagacaaccataccattactctcaaccaactactgcgccctttcaagctcaggcgaaatttcataaacctgcaaataagttaatcgataatggtaataggagtaatagtaacaataacaatcataatgggaatgatgcagttggtgtgatgcataatgacgaggatgatcaagatgatgatctagtatttttcatgagtgatatgaacctttctaaagaaggttaa

SEQ ID NO: 8398 - protein, 738 aa, Saccharomyces cerevisiae
MVAEEDIEKQVLQLIDSFFLKTTLLICSTESSRYQSSTENIFLFDDTWFEDHSELVSELPEIISKWSHYDGRKELPPLVVETYLDLRQLNSSHLVRLKDHEGHLWNVCKGTKKQEIVMERWLIELDNSSPTFKSYSEDETDVNELSKQLVLLFRYLLTLIQLLPTTELYQLLIKSYNGPQNEGSSNPITSTGPLVSIRTCVLDGSKPILSKGRIGLSKPIINTYSNALNESNLPAHLDQKKITPVWTKFGLLRVSVSYRRDWKFEINNTNDELFSARHASVSHNSQGPQNQPEQEGQSDQDIGKRQPQFQQQQQPQQQQQQQQQQQRQHQVQTQQQRQIPDRRSLSLSPCTRANSFEPQSWQKKVYPISRPVQPFKVGSIGSQSASRNPSNSSFFNQPPVHRPSMSSNYGPQMNIEGTSVGSTSKYSSSFGNIRRHSSVKTTENAEKVSKAVKSPLQPQESQEDLMDFVKLLEEKPDLTIKKTSGNNPPNINISDSLIRYQNLKPSNDLLSEDLSVSLSMDPNHTYHRGRSDSHSPLPSISPSMHYGSLNSRMSQGANASHLIARGGGNSSTSALNSRRNSLDKSSNKQGMSGLPPIFGGESTSYHHDNKIQKYNQLGVEEDDDDENDRLLNQMGNSATKFKSSISPRSIDSISSSFIKSRIPIRQPYHYSQPTTAPFQAQAKFHKPANKLIDNGNRSNSNNNNHNGNDAVGVMHNDEDDQDDDLVFFMSDMNLSKEG

SEQ ID NO: 8399 - DNA, 2286 bp, Candida albicans SC5314
  CDS (1)..(2286): transl_table=12
atgttgtcagatttcaaacaacagcagcaacaaaagcatcattcacataatccaccaaatagtcatgacgatactcagactaaattgcaagttgccaaattgactcaagtgattcagaagtttttcaccaaggcagcacaaatcattctagaatcaagagcgtatccagaaacttcaacgccttcattatatcccactaaggaagagtcaagtaaaataaataaatggtttaacctttacatgaccaatataccagatctgtgcaaagatgatttgaagttgtggaaaggagttgacttaaccactattccaccaatgattatagaaacctatattgatttgagaagcttgccagccgatcaaactttagttttgatggatgatgaaaaacatccttggacagtggcaaaatcacgtggcaaaaagcaagaagtcgttctagagagatggttaattgaatttgaaccaaacactacagacgccaccgtgatggttgaagaactacctttgagctataaacaggcaatagtgctctttagaagcatatatgggtttacaagattgatgccagcattcaaagtgaaaaagaatttacagaacaaattgcccttgggaaataaaatattagatggtaatcaaccaattagctccaaaggtagaattggattatctaaacctattatcaataccagaactaatgagtctcatatgacacagaaatattttcaaccagtacatacaagtctcgggacattaaaaatatcggtagcttatagaatggattccgagttttgtctacatgaaaatgaagagttactactgtcccatttccataagcgtgatgaagaagaaacgaaaaagaaagtgtcatcctcagtttctcctctttcctcgggtacaagcttaaaagaaacatcaacttcaccaaggaaatcacagcctcccatccgtatacagccatttaaagttggatcgatgagtacatcgccaccagtgcaatcaccatcaatttcacaaccaggaacagcaccaattcaaaatcaaccaagtgtcccgtcgtcttcattagaaagaagagtatcgatcactagtaacaaatcaacttctaatgcatcattagcggcatttttacgtaatgccagaagtagtactccgtcagcaaataatattcccataatcaatgcaaatcccatttctggtacgtctgttccacggtcttttagttcgtctacgggtcatgaggattccatttttgtcaatcctgatagtgctagtaacactcctcgatttgcatcgtcatttggttcacgcgcaagcagacggtatagtagtaccagtatcagacaacaaactccccaatccgatttaatgggtcaaaccaatagtgttgatgcggctttgagtggaatagatgctgatgatgacataagtgactttgtccgtatgattgatagtaaatcagatttgagattaggcggtggcggtggtggtggaaacagcagtgttcacaatatgagtatcaatgaatcatcatatcatggggatgcgttaaataaatttcaatcattgcgcagtcagtatcaacaattgagtgatagtgtcagtgctagtttgattttgcaatcacgtcattctagtaggaaaagttctttgaattcacctgcgggatcatttgatctgcatcatcaccaacatcaacaacaacaacaacaacaacagaatcaacaacaatctcaatcaccacacactaatacaacatcatctattcattctcacgcacattcttattcccattctcggatgaaggatgcaagacctagaagtgaagaccatcaacaaactaaattttccgcagcaagaagaagttcaaatatttcacccactacagcagtaccaagttcaattggtacaccatcactgataagttcaagaatacctcatgtaactacaattatctcatctagtgatgtgagcagtactggaggtaatcgtacgaaaagtgctgccacaacagctattgttagtggtatggctacttcgccttccatatatgactatcgatcacctcgttaccagaatgtttttgatgacgatgacgaggatgataatgacgaagaagaaggcgatcgtgaaggtaatcaattacacgagggcagaaatagtacagaaagtagtcaaaatcaatcaaaacgtataatgaaacatattaaaaaagatgaagaggatagtgaagatgacgaagatttgttgtttactatgagtgatatgaattcaaggaatttttga

SEQ ID NO: 8400 - protein, 761 aa, Candida albicans SC5314
MLSDFKQQQQQKHHSHNPPNSHDDTQTKLQVAKLTQVIQKFFTKAAQIILESRAYPETSTPSLYPTKEESSKINKWFNLYMTNIPDSCKDDLKLWKGVDLTTIPPMIIETYIDLRSLPADQTLVLMDDEKHPWTVAKSRGKKQEVVLERWLIEFEPNTTDATVMVEELPLSYKQAIVLFRSIYGFTRLMPAFKVKKNLQNKLPLGNKILDGNQPISSKGRIGLSKPIINTRTNESHMTQKYFQPVHTSLGTLKISVAYRMDSEFCLHENEELLSSHFHKRDEEETKKKVSSSVSPLSSGTSLKETSTSPRKSQPPIRIQPFKVGSMSTSPPVQSPSISQPGTAPIQNQPSVPSSSLERRVSITSNKSTSNASLAAFLRNARSSTPSANNIPIINANPISGTSVPRSFSSSTGHEDSIFVNPDSASNTPRFASSFGSRASRRYSSTSIRQQTPQSDLMGQTNSVDAALSGIDADDDISDFVRMIDSKSDLRLGGGGGGGNSSVHNMSINESSYHGDALNKFQSLRSQYQQLSDSVSASLILQSRHSSRKSSLNSPAGSFDSHHHQHQQQQQQQQNQQQSQSPHTNTTSSIHSHAHSYSHSRMKDARPRSEDHQQTKFSAARRSSNISPTTAVPSSIGTPSSISSRIPHVTTIISSSDVSSTGGNRTKSAATTAIVSGMATSPSIYDYRSPRYQNVFDDDDEDDNDEEEGDREGNQLHEGRNSTESSQNQSKRIMKHIKKDEEDSEDDEDLLFTMSDMNSRNF

SEQ ID NO: 8401 - DNA, 1980 bp, Ashbya gossypii
  CDS (1)..(1980)
atggctatggaatcggaatgcaatgtggtagagctgatcggcgggttcttcctgaaggcgacgctgcttgtgtgccagcctcggacgggggcaattgaaggggatggtgaggaggaccggacgtttaatatcagcagcgcggctgatgcgggcgtggcggaggcggtgcgggcgtggacggcctacgacggggcgcaggagttgccgccgctagtgatagagatgttcctggacctgcggcggctggggccacaacacacggtggtgctgaaggaccaggacggcaacccgtggaatgtttgcaagggcgggaagaagtctgaaatcatgctggagcggtggttggtcgaactggacgtgggcaatgaggaggcgcgcccggaggagccacccaatgcggctgagatatacaagcagctggtgctactgttccgctatctgtacacgctgacgcagctactccccgcgaacgagttgtacgcacggctgcacgggccttctaaccagggcgaggcagcaatgcctttgatcaatatagggacacgtatactggatggctccaagcctatcctgtcgaaaggtcgcgtggggcttagcagaagtattatcgccacctacacgaatgtaatcaacgagaccaatgtggcctctcatctggaacaaaaaaagatcactccaatcagcacgggctacggctcactgcggattacagtatcctatcgacgtgactgtaactttgacgtcaacgaggttttagattatgaaggcaataactgcagcagcagctctgttgtcgatacacacacgaaacctggagtgggcccgctatcttcattaaggagagtgtcaatccacagtaatcgatccatgtctatttctccccaaacggtttacagcgggactgtgatccccgatccatcccctcaaagaaagtcatcttcttccagaatacaaccattcaaggctggctctgttggaagcggctccctcgcaatcgcgaggaatccatctggttcatctgctgtcgccaccctgagagcgcagaggtccgggagcgcatccatctctacgcatgtggccgaccaagccgttggcgaaccgtccagcgtaggcagcggcgggtccaaatattcatcttcctttggtaaaataaggcgacagtcaagtatgcggcggtctgggagtcttgaattgcctgccgctaagcaagcgaaacctggtgagcgcggatctgatgagttgctagactttgtgaaaatgttggaggaaaaacaggaactaaatgtgaagaagctatacggtactaccaccgacatctccagctcgttagtccgttttcaatcaatgaaatcaaacaacgatacactaagcgaagacctatctatgagctactcgctggagcctacacatgctcctcaggtaaggtataggtctaactcgcattcgcccattccatccatctctccctctgtacaatacacctctatcccgatgagactttcccaaagtcgcaacgtaagccaaactgaattagctagcagaaagaactctgctgaaaggctgaaaactttgatttcgagtaggacaggtagcttctcggagtccaggcgccagtcaaatgcgggacaagaggatattctcgaagatgaggatgatgaggcagaagagatcctattgagcaagtcgcatctcagcaaccctacaggaacaagattgcaatcaatgtcgccgcaatccttaaaaagcatttcctcgtacaatagagcggcagtgccgttcaagcctgtttctaacttttcatgtcccactacaatggctacccctgcacatgcaaaattacacaaggcaagtatcagttcatcaccagataatcagtccggcctggtcaaaaaggaccacgagcacagcacaatgacgggcggtgatgatgatgacgacttgctattctttatgagtgatatgaacctatctagccaatga

SEQ ID NO: 8402 - protein, 659 aa, Ashbya gossypii
MAMESECNVVELIGGFFLKATLLVCQPRTGAIEGDGEEDRTFNISSAADAGVAEAVRAWTAYDGAQELPPLVIEMFLDLRRLGPQHTVVLKDQDGNPWNVCKGGKKSEIMLERWLVELDVGNEEARPEEPPNAAEIYKQLVLLFRYLYTLTQLLPANELYARLHGPSNQGEAAMPLINIGTRILDGSKPILSKGRVGLSRSIIATYTNVINETNVASHLEQKKITPISTGYGSLRITVSYRRDCNFDVNEVLDYEGNNCSSSSVVDTHTKPGVGPLSSLRRVSIHSNRSMSISPQTVYSGTVIPDPSPQRKSSSSRIQPFKAGSVGSGSLAIARNPSGSSAVATLRAQRSGSASISTHVADQAVGEPSSVGSGGSKYSSSFGKIRRQSSMRRSGSLELPAAKQAKPGERGSDELLDFVKMLEEKQELNVKKLYGTTTDISSSLVRFQSMKSNNDTLSEDLSMSYSLEPTHAPQVRYRSNSHSPIPSISPSVQYTSIPMRLSQSRNVSQTELASRKNSAERLKTLISSRTGSFSESRRQSNAGQEDILEDEDDEAEEILLSKSHLSNPTGTRLQSMSPQSLKSISSYNRAAVPFKPVSNFSCPTTMATPAHAKLHKASISSSPDNQSGLVKKDHEHSTMTGGDDDDDLLFFMSDMNLSSQ

SEQ ID NO: 8403 - DNA, 1983 bp, Candida glabrata
  CDS (1)..(1983)
atgtcaaatgggaatgacaatcaggttattgaactgatccagaatttcttcctgaaatcagcgggtctggtcacaacagtggaaagcaatcgatactctcttgatgacacatccatagaattcgatgacgaatggtttgatatgaatattgatgtcttacatgatttaccaccaataatagataaatggacgaacttcgatggtacccaggaattaccaccattagtgatagaaacatttttagatttacatttactaccatcaagttatacagtgcgtttacgtgatgatgagagccacttatgggctgtatcaaaaggaaacaagaaatcagagattgtactagaaagatggctgatagaactggataaggaatctacttcattcaaaaatcacgttcagagtggttcaggtgtttctcctgagaaattagatcaacagcttagattactcttccgatatttatttacgttactgcaactccttccttccaatgacttaatgatggctttaaataatcagtcagaatctcataacacaccaatacctgtagatatcaaaacaagaatactagatggctctcagcctatattatcgaaaggaaggattggattgagtagaccaattattagctcctactctaatataatcaacaatagcaatatccctgcacatttagaacaaaaaaaaataacgccagtgtggactaagtatggacttcttaggatttcagtgtcatacagaagggattgccaatttatatttcaagacctaaatgaagataactcaccaaatacgcaaatcacaaatcaaccagcaaaaactaatgaaatatcaatatctttatctcccagatctaaaaatgatcttaaccaaatatcacatccttcctggcaaaagaaatttatatcatcctctaagcaatttcagccttttattgttggttctgttggaagtgcgaataccccaaatcaaaactcaagtcgtaacccttcaaactcttctgtagtaggtcctcattatcatcctcaacacagattaagtattggatcatctactagtgtttctacgcaacccaattatgaaggtactagcgtcggaagtacatcaaaatttgcctcttccttcaataacttgcgccgccactctagtgtaagataccatgaaagcaccgaaaagttggccaagacagacaagaataattatgaggatacagacgatttaatggaatttgtccgactcatagaagcaaaaccagaactgcaacctaaaaaagggttatcaggtctacaagataagaatttgtctggatcgattttaagatatcaaaaactaagaccaagtaatgatatgttatcggaggatctagctttaagtgtttccattgatcccattcatggatcacaaagaagaaattcaaattcacactcacattctcctgttgcatccttttccccgtctggccatttttcttcgattaattctaaattgtctcaaccacatttggctgtcagaggaagtagtagtactgtcaatagtagaagaaattcggtagataaagttctcgctagtgcactatctccaatctatggtggggatattccagaatatcatacgaagtctcataaccctgtttttaatgaagttgacgatgaagaggaaggaaacgatgatttgttggtcaacaaaataccaatcaatatcaataagcataaaatgtcaacttcaccacgttcaattgacagtatctcaaattcgctaacacgaaacagaactccattcagacaaccatatcaatattcacaacctactactattgcaacgcaggcatatgcaaaaatgcacagaccgaccgttcgatcttctgatgcaatatcagagatcaattcaagaaaaggcgataatttccatcaactgattaatgataacgacgaagatgatttagtattttttatgagtgatatgaatttaccgagggaataa

SEQ ID NO: 8404 - protein, 660 aa, Candida glabrata
MSNGNDNQVIELIQNFFLKSAGLVTTVESNRYSLDDTSIEFDDEWFDMNIDVLHDLPPIIDKWTNFDGTQELPPLVIETFLDLHLLPSSYTVRLRDDESHLWAVSKGNKKSEIVLERWLIELDKESTSFKNHVQSGSGVSPEKLDQQLRLLFRYLFTLLQLLPSNDLMMALNNQSESHNTPIPVDIKTRILDGSQPILSKGRIGLSRPIISSYSNIINNSNIPAHLEQKKITPVWTKYGLLRISVSYRRDCQFIFQDLNEDNSPNTQITNQPAKTNEISISLSPRSKNDLNQISHPSWQKKFISSSKQFQPFIVGSVGSANTPNQNSSRNPSNSSVVGPHYHPQHRLSIGSSTSVSTQPNYEGTSVGSTSKFASSFNNLRRHSSVRYHESTEKLAKTDKNNYEDTDDLMEFVRLIEAKPELQPKKGLSGLQDKNLSGSILRYQKLRPSNDMLSEDLALSVSIDPIHGSQRRNSNSHSHSPVASFSPSGHFSSINSKLSQPHLAVRGSSSTVNSRRNSVDKVLASALSPIYGGDIPEYHTKSHNPVFNEVDDEEEGNDDLLVNKIPININKHKMSTSPRSIDSISNSLTRNRTPFRQPYQYSQPTTIATQAYAKMHRPTVRSSDAISEINSRKGDNFHQLINDNDEDDLVFFMSDMNLPRE

SEQ ID NO: 8405 - DNA, 2514 bp, Debaryomyces hansenii
  CDS (1)..(2514): transl_table=12
atggtttcacccgggcagaatgacttatcttctgataagagtcagatcgatccttttgttaaaaagcagaatgccaagttaacacaggtaattcagaactttttcagtaagtctgttcagatagttctacaatcaaggatccagtcagaaagtcataataaagaggaacagctcaaggtaggaggtgatgttggaggtcataatgtaagctcaaaaatcaacaaatggtttaatttgcatatgtataatgataacttacccaaagaagagcttaagttatggaagaatataaatgacgtgtcccagatgcctccgatgattatcgaggtatacttggatttaagacaattgacggcgatacaaactgtgatattacgggatgataatggtaacccatggacagtggcgaagggaggttcaaaaaagcatgaagttgtactagagagatggcttattgagtttgatgcgaatactgtttctggaactatagtagatgaattgccattgatatacaaacaggcaatcattttgtttcgaagtctatatgggtacacaaggcttatgccgactttcaaattgaaaaagaacttaaataagtcgaatctaaatatagggtgtaagattcttgatggtaaacaacctattagctcaaaaggtaggatcggtctttcgaaatcaattatcccacatcaaatgttaactactgaatcacatatgagccataaacatttcttgcctatacagaccactttaggtacgcttaagatttcaatcgcttataggaaccatcatgaattttctattcatgataatgaagaattattatccactcacttcgttaatattgatgataatgacaaagattctgaaatcactccagttgaaattgagtttaaggaagaattaaaaattgacagagattcgactaccaatgaaaaagtgaatgaacctgaagatgatgagctgcatcatgcagacgttgaaagtagccaagaacatttacaatcggaagagccagatgaatcgttcgaacaagatgctaaacatataagtggctcgcgtaagaaattctctatatcaaataatgcttctatgtcactttcaccatgttcatcaggtccccaaacagtgacggaagattctccatcgcataataagccatcggcaaatacaacaccgattgtatcacagcgtccaactataaatccattcaaggttgggtctatcagtacatctccaccagcaacgacgaattttggaggatcttccttagagagaaaggtgtcaattacgagcaacaagtctgcgtctaatgcttcattggcagctatgttgagaaatcctaggagtagcacttcctcaaccaacactactgcaaatatccctattgcgaataataattctaataatcaatacaattcaacattccctcgttcggtttcctcatctcatgggtctaatttggcccatgataatgataacttacttgggttttctaatccagacaatacttccaacactccaagattctcatcatcctttggatcccgagctagcaggagattctcaaatacaagtggtcgtcaaagcagtttgccatctggtaacatgaatgacacgtcgcttttagctacaagtgcaggactggcttcatcggatgccccaatgagtggactctacatagatgatgacataggtgatttcgtccggatgatcgacagcaaatctgacctcaggttttcaggctacaattcaaataatgattctaagatttcgtataaccagggttcaaacagtcagatagatgctttgaataaattccaaatgctaaagaaccagcatcagcaattaagtgacagtgtgagtgccagtctaatcttacaccataaccaacttagcggaagcaggccatcaagtaggaaatcgtcgcattctatacactctcctcccccttcgttaccttcaggttcctacgataattcacacttgccctcaattaattccaaattgagagaaaatagtagcaccagtggaaatgatgataatcttgctagagattctggtactccatcttcgcgaaagaatagctttgattattcgactaacagcaacactacattcttgaaatccccaattacgaataagttagtatcatccccggtaacctcgactacacccattcattcgtgtttacataagacaaataacgaatcgggtgtaatttccggtttggctactaccccttccatctataatgatcgccgtcaaattcattacgaaagtgtgttcgatgatgatgatgatgactatgcaaacaatacagcggataatcgtgatcaagacgatagtctaaaattgtaccttaccaacaagcttgctaatgcgcctaaatctaacaccaattcaagaagtcttaaatcttctaccaaccccccaaatattggtgaagatgatgatgatgatgatgatgatttattatttaccatgagtgacatgaatcttgctaaacactga

SEQ ID NO: 8406 - protein, 837 aa, Debaryomyces hansenii
MVSPGQNDLSSDKSQIDPFVKKQNAKLTQVIQNFFSKSVQIVLQSRIQSESHNKEEQLKVGGDVGGHNVSSKINKWFNLHMYNDNLPKEELKLWKNINDVSQMPPMIIEVYLDLRQLTAIQTVILRDDNGNPWTVAKGGSKKHEVVLERWLIEFDANTVSGTIVDELPLIYKQAIILFRSLYGYTRLMPTFKLKKNLNKSNLNIGCKILDGKQPISSKGRIGLSKSIIPHQMLTTESHMSHKHFLPIQTTLGTLKISIAYRNHHEFSIHDNEELLSTHFVNIDDNDKDSEITPVEIEFKEELKIDRDSTTNEKVNEPEDDELHHADVESSQEHLQSEEPDESFEQDAKHISGSRKKFSISNNASMSLSPCSSGPQTVTEDSPSHNKPSANTTPIVSQRPTINPFKVGSISTSPPATTNFGGSSLERKVSITSNKSASNASLAAMLRNPRSSTSSTNTTANIPIANNNSNNQYNSTFPRSVSSSHGSNLAHDNDNLLGFSNPDNTSNTPRFSSSFGSRASRRFSNTSGRQSSLPSGNMNDTSLLATSAGLASSDAPMSGLYIDDDIGDFVRMIDSKSDLRFSGYNSNNDSKISYNQGSNSQIDALNKFQMLKNQHQQLSDSVSASLILHHNQLSGSRPSSRKSSHSIHSPPPSLPSGSYDNSHLPSINSKLRENSSTSGNDDNLARDSGTPSSRKNSFDYSTNSNTTFLKSPITNKLVSSPVTSTTPIHSCLHKTNNESGVISGLATTPSIYNDRRQIHYESVFDDDDDDYANNTADNRDQDDSLKLYLTNKLANAPKSNTNSRSLKSSTNPPNIGEDDDDDDDDLLFTMSDMNLAKH

SEQ ID NO: 8407 - DNA, 2055 bp, Kluyveromyces lactis
  CDS (1)..(2055)
atgtcagaaggtgaagttcaggtgatagaactcataaataacttctttcttaagtctgcgcttctacttgagcagtccaaggtagcacataactttgatacggaggaggcgctgagggatgggaatcatttgtttaacattgaaactcgcggcgaccctctgttggaggctcagatccagccctggatcacgtttgatggagtgaagacaatgccgccattagtaatagaaacgtacttggatctacgagctttgcaacccaaccatatggtgtatcttcatgacgcggatggtaatccatggatggtttgtaaagggggcaagaaaactgagattgtactggaaagatggcttgtagaacttgataagcagacgatagatgactccatcgattcaaatgatcctgaaaacttgcataaacaattggtattgttgttccgctacttgtacacgcttacccaactcttacctgccaacgacatcattaccaagccacacaattcacaacagcccgcacttataaatgttcaaactagactacttgacggttctaagcctattctctctaaggggagggtcggtttaagtaaacctattattgcatcatattccaacacaatgaatgaaacaaacattgcttcacatctagaacaacgaaagattacaccgataaaaactacatttggctcgttgcgtatcacggtgtcttatagaaaagatgtcgacttttatgttattgattcagatgatttacaaaaacgatacatgacaccatccttatctaatgaaactaccacggtacctgatagaagggcttcatccaattgtagcagatctatgtcagtttcccccaagacaaataccatcaatgcgacgctttttcccctagaaggttcatcggcaagaaggcaatccatctcttctaaactgcaaccttttaaagttggatcagttgggagtggctcgtttgtacagagtggcagtgcccagtcgactacgagtcttgttccaagtttatcaaggaatgtttcgagttcatcagtggttgctgcgttgaaagttcaacgtggtagtgccgggtctactatagtaaatggtgatgtaccaccagaactttctagtgttggtagcggatcgaaatattcttcatcttttggcaggatccgccgtcattctagtattagaagatcagaaagttttgacaggaccgctaaaccaaggaaatccactgaaaacccaccggaagatttgttagagtttgtgaaactcttggaagacaagaaagagttgaacatgaaacctaatacaatattgccgcaacaagatatctcaaactcattgatgcgatttcagtccatgaaaagtaataacgatgctcttagcgataacctttcgatgagtatgtccatcgaccagcctaatgttaggtttggctcaaattcacattctccaataccttcattttcaccaaattatggttccattccctccaggctatctcaaggtagtagaaacaatagtaatgcggaattgattaccagcaggaaaagctcattggatagacacaagcataatctattgagcagaactggaagcaacgttgacataaacaggagaggttctgtaggaactatggaaacgactaatgaagattctaaagaggacgaacagtctcacatgaaaggaatgcacttcagcaatgaagcaaccataaataaagatgacgatgaggatgaaatgttaatgaaacgttcatttaacgctggaacatctactactgagcaggttatggggtcgcccagatctataagaagtatttctgtaagttcttacccaagaaaccagcttccattgaaacatctcaacctctctcaccctacaacatcggctaccactacccatgcaaaatttcataagagtgaaatgagccccgacccactgcacacagaaggagcacaaccgcatactagctcgcaacatcataatagctctcaaaaaaatgatgaagatgatgatttgttatttgttatgagtgatatgaatctaaccaactaa

SEQ ID NO: 8408 - protein, 684 aa, Kluyveromyces lactis
MSEGEVQVIELINNFFLKSALLLEQSKVAHNFDTEEALRDGNHLFNIETRGDPLLEAQIQPWITFDGVKTMPPLVIETYLDLRALQPNHMVYLHDADGNPWMVCKGGKKTEIVLERWLVELDKQTIDDSIDSNDPENLHKQLVLLFRYLYTLTQLLPANDIITKPHNSQQPALINVQTRLLDGSKPILSKGRVGLSKPIIASYSNTMNETNIASHLEQRKITPIKTTFGSLRITVSYRKDVDFYVIDSDDLQKRYMTPSLSNETTTVPDRRASSNCSRSMSVSPKTNTINATLFPLEGSSARRQSISSKLQPFKVGSVGSGSFVQSGSAQSTTSLVPSLSRNVSSSSVVAALKVQRGSAGSTIVNGDVPPELSSVGSGSKYSSSFGRIRRHSSIRRSESFDRTAKPRKSTENPPEDLLEFVKLLEDKKELNMKPNTILPQQDISNSLMRFQSMKSNNDALSDNLSMSMSIDQPNVRFGSNSHSPIPSFSPNYGSIPSRLSQGSRNNSNAELITSRKSSLDRHKHNLLSRTGSNVDINRRGSVGTMETTNEDSKEDEQSHMKGMHFSNEATINKDDDEDEMLMKRSFNAGTSTTEQVMGSPRSIRSISVSSYPRNQLPLKHLNLSHPTTSATTTHAKFHKSEMSPDPLHTEGAQPHTSSQHHNSSQKNDEDDDLLFVMSDMNLTN

SEQ ID NO: 8409 - DNA, 2340 bp, Pichia stipitis
  CDS (1)..(2340): transl_table=12
atggcttcccaagatatcctgtaccagtacaaactgcagcaggagcattatcccaacgaaaagatctcagattcatatgttcagaagcaaaactccaagctcactcaagttatccagcaatgtttcagcaaggccgtcaagataatcatccaatcacgaacggttcctccggcagctgcatcgccattgctcaatccagcacttcacgatgattctgccagcggaaacaaaatcaatcgttggttcaatttgcatatccagaactcccaggatcttcccaaagacgatctcaagctctggaagtccaaccacttgcaaagtatgcctcccatgatcatcgagacgtatcttgacttgaggcaattgacctcaagtcaaaccatagttttgaatgatgataacggtaacccgtgggcagtagccaagagcggaggcaagaagcaggaagtggttttagaaagatggttgattgaattcgaccacacagatgctctgggctcgatagtagacgaattacctttgatctacaagcaggccattattttgttccgcagtatctatggttttgctcgtctaatgcctgctttcaagttgaaaaagagactcttgatcaacaaatcaagcaccaagttaaacaaattgactataggcaacaaaattttggatggaaaacagcccatcagctctaagggaagaattggcttatccaagacgataatcccacgtcaaatgctcactactgactctcatatgagtcaaaagcatttccagcccattcaaaccagcttagggactttaaagatatccatagcctatagaaaccactgcgatttctgtattcacgacaacgaagaggtgctttctactcatttcataagcatggattcaactcccttgactgaatcgggacatggccatactaaggctaacaatacttcaatgtctgtctcaccttgttcttcgggacatcctgctttgagagagggttctcctacgaagaggggaacacctccaacggcgattcaaccattcaaggttggctctattagtaattctcctcctccagcatcacatacgccaaatagcggctatggaggatcgttggaaaggcggatttctattacaagcaacagatcgacttcaaatgcttctttgtttgcaatgttgagaaaccctagaagtagtacatcgtcaacacataccacttctaatatcccgatagcaccgagctcgtcgagtaatagcactaatgccacgaacatgaataacatgtcgtatcctcgctctatttcttcttcgcacggttcaaacatgcaacatgacgatagcatgttttcaaatccagacagtaccaccaatacgccgcgcttttcgtcttcgtttggctcgcgtgccagcagaaggtactccaatactagtgtaagacaaagtactcctgtagctgctagcacattaactggtggaagtcccttgagtggactttatattgatgatgatatcagtgagtttgttcgtctgattgatagtaaagcagatcttcgtttctctaattcgtataccgctcataacagcggtgaacccaagaacaatatgggttctccaagtggaggtgacgctttaaacaagttccagatgatgaagagtcaccaccaacaattaggtgacagcgtaaatgccagcttaattttgcagcataacaatgcagtcagtggttctggcagtggatttggcgtaagcaattccagacactccagcacaagtcgtaagagctcccattctatacgttcgccttctccttcgatgtctgggctttatgatgtagttcctggcagctatgggagatctgagagaaggtcttcttcgggagctggtgttcctggtcagctttcattaccttctggtggtggtttggctgcacattctccgtcggccacagaacctacttctgctgcgacgataacgccgcgcgaaacgaattttaacttttccaatgcatcatttcttcgatcggcaagcaagctttctgcaacccctgtcacttctacaactacagcgcatgctacaatccatctggtgactggtatggctacttcaccttctttataccaacgtacgaaggttggatcgtctattcactatgaaaatgtgtttgaagatgacgacgacgacgagatggttatgaaaaaaccagtcgtcacctcttccggcagagatgaagaacagctacaacacaaacaaatgaaagtggtaagtatagaaaaagatgcaggtgcaaataatttcgacgacgatgacttgctatttactatgagcgatatgaaccttaccaaaagttcatag

SEQ ID NO: 8410 - protein, 779 aa, Pichia stipitis
MASQDISYQYKSQQEHYPNEKISDSYVQKQNSKLTQVIQQCFSKAVKIIIQSRTVPPAAASPLLNPALHDDSASGNKINRWFNLHIQNSQDLPKDDLKLWKSNHLQSMPPMIIETYLDLRQLTSSQTIVLNDDNGNPWAVAKSGGKKQEVVLERWLIEFDHTDASGSIVDELPLIYKQAIILFRSIYGFARLMPAFKLKKRLLINKSSTKLNKLTIGNKILDGKQPISSKGRIGLSKTIIPRQMLTTDSHMSQKHFQPIQTSLGTLKISIAYRNHCDFCIHDNEEVLSTHFISMDSTPLTESGHGHTKANNTSMSVSPCSSGHPALREGSPTKRGTPPTAIQPFKVGSISNSPPPASHTPNSGYGGSLERRISITSNRSTSNASLFAMLRNPRSSTSSTHTTSNIPIAPSSSSNSTNATNMNNMSYPRSISSSHGSNMQHDDSMFSNPDSTTNTPRFSSSFGSRASRRYSNTSVRQSTPVAASTLTGGSPLSGLYIDDDISEFVRSIDSKADLRFSNSYTAHNSGEPKNNMGSPSGGDALNKFQMMKSHHQQLGDSVNASLILQHNNAVSGSGSGFGVSNSRHSSTSRKSSHSIRSPSPSMSGLYDVVPGSYGRSERRSSSGAGVPGQLSLPSGGGLAAHSPSATEPTSAATITPRETNFNFSNASFLRSASKLSATPVTSTTTAHATIHSVTGMATSPSLYQRTKVGSSIHYENVFEDDDDDEMVMKKPVVTSSGRDEEQLQHKQMKVVSIEKDAGANNFDDDDLLFTMSDMNLTKSS

SEQ ID NO: 8411 - DNA, 23 bp, Artificial sequence
  primer
atggttgccgaagaggacatcga

SEQ ID NO: 8412 - DNA, 27 bp, Artificial sequence
  primer
ttaaccttctttagaaaggttcatatc

SEQ ID NO: 8413 - protein, 886 aa, Artificial sequence
  consensus sequence
  Variant (2)..(3): Xaa in position 2 to 3 is any amino acid
  Variant (6)..(6): Xaa in position 6 is any amino acid
  Variant (8)..(29): Xaa in position 8 to 29 is any amino acid
  Variant (30)..(46): Xaa in position 30 to 46 is any or no amino acid
  Variant (48)..(63): Xaa in position 48 to 63 is any amino acid
  Variant (64)..(64): Xaa in position 64 is any or no amino acid
  Variant (66)..(73): Xaa in position 66 to 73 is any amino acid
  Variant (74)..(74): Xaa in position 74 is any or no amino acid
  Variant (77)..(78): Xaa in position 77 to 78 is any amino acid
  Variant (81)..(82): Xaa in position 81 to 82 is any amino acid
  Variant (87)..(87): Xaa in position 87 is any amino acid
  Variant (89)..(95): Xaa in position 89 to 95 is any amino acid
  Variant (97)..(97): Xaa in position 97 is any amino acid
  Variant (99)..(103): Xaa in position 99 to 103 is any amino acid
  Variant (105)..(105): Xaa in position 105 is any amino acid
  Variant (107)..(107): Xaa in position 107 is any amino acid
  Variant (109)..(109): Xaa in position 109 is any amino acid
  Variant (111)..(111): Xaa in position 111 is any amino acid
  Variant (114)..(114): Xaa in position 114 is any amino acid
  Variant (116)..(116): Xaa in position 116 is any amino acid
  Variant (123)..(123): Xaa in position 123 is any amino acid
  Variant (125)..(125): Xaa in position 125 is any amino acid
  Variant (127)..(142): Xaa in position 127 to 142 is any amino acid
  Variant (143)..(148): Xaa in position 143 to 148 is any or no amino acid
  Variant (151)..(153): Xaa in position 151 to 153 is any amino acid
  Variant (157)..(163): Xaa in position 157 to 163 is any amino acid
  Variant (165)..(165): Xaa in position 165 is any amino acid
  Variant (167)..(184): Xaa in position 167 to 184 is any amino acid
  Variant (185)..(203): Xaa in position 185 to 203 is any or no amino acid
  Variant (207)..(208): Xaa in position 207 to 208 is any amino acid
  Variant (211)..(211): Xaa in position 211 is any amino acid
  Variant (216)..(216): Xaa in position 216 is any amino acid
  Variant (220)..(221): Xaa in position 220 to 221 is any amino acid
  Variant (224)..(230): Xaa in position 224 to 230 is any amino acid
  Variant (231)..(237): Xaa in position 231 to 237 is any or no amino acid
  Variant (239)..(240): Xaa in position 239 to 240 is any amino acid
  Variant (243)..(245): Xaa in position 243 to 245 is any amino acid
  Variant (247)..(248): Xaa in position 247 to 248 is any amino acid
  Variant (250)..(251): Xaa in position 250 to 251 is any amino acid
  Variant (253)..(253): Xaa in position 253 is any amino acid
  Variant (255)..(255): Xaa in position 255 is any amino acid
  Variant (257)..(259): Xaa in position 257 to 259 is any amino acid
  Variant (262)..(265): Xaa in position 262 to 265 is any amino acid
  Variant (267)..(291): Xaa in position 267 to 291 is any amino acid
  Variant (292)..(363): Xaa in position 292 to 363 is any or no amino acid
  Variant (365)..(365): Xaa in position 365 is any amino acid
  Variant (367)..(367): Xaa in position 367 is any amino acid
  Variant (370)..(392): Xaa in position 370 to 392 is any amino acid
  Variant (393)..(401): Xaa in position 393 to 401 is any or no amino acid
  Variant (409)..(418): Xaa in position 409 to 418 is any amino acid
  Variant (419)..(451): Xaa in position 419 to 451 is any or no amino acid
  Variant (453)..(454): Xaa in position 453 to 454 is any amino acid
  Variant (456)..(489): Xaa in position 456 to 489 is any amino acid
  Variant (490)..(529): Xaa in position 490 to 529 is any or no amino acid
  Variant (534)..(535): Xaa in position 534 to 535 is any amino acid
  Variant (536)..(537): Xaa in position 536 to 537 is any or no amino acid
  Variant (540)..(540): Xaa in position 540 is any amino acid
  Variant (542)..(564): Xaa in position 542 to 564 is any amino acid
  Variant (565)..(581): Xaa in position 565 to 581 is any or no amino acid
  Variant (583)..(585): Xaa in position 583 to 585 is any amino acid
  Variant (588)..(592): Xaa in position 588 to 592 is any amino acid
  Variant (594)..(595): Xaa in position 594 to 595 is any amino acid
  Variant (597)..(611): Xaa in position 597 to 611 is any amino acid
  Variant (612)..(623): Xaa in position 612 to 623 is any or no amino acid
  Variant (625)..(627): Xaa in position 625 to 627 is any amino acid
  Variant (629)..(636): Xaa in position 629 to 636 is any amino acid
  Variant (639)..(643): Xaa in position 639 to 643 is any amino acid
  Variant (645)..(659): Xaa in position 645 to 659 is any amino acid
  Variant (660)..(684): Xaa in position 660 to 684 is any or no amino acid
  Variant (687)..(687): Xaa in position 687 is any amino acid
  Variant (690)..(697): Xaa in position 690 to 697 is any amino acid
  Variant (698)..(703): Xaa in position 698 to 703 is any or no amino acid
  Variant (705)..(846): Xaa in position 705 to 846 is any amino acid
  Variant (847)..(873): Xaa in position 847 to 873 is any or no amino acid
  Variant (878)..(878): Xaa in position 878 is any amino acid
  Variant (880)..(880): Xaa in position 880 is any amino acid
IXXFFXKXXXXXXXXXXXXXXXXXXXXXXXXXXXXXXXXXXXXXXXFXXXXXXXXXXXXXXXXXWXXXXXXXXXPPXXIEXXLDLRXLXXXXXXXLXDXXXXXWXVXKXGXKKXEXVLERWLXEXDXXXXXXXXXXXXXXXXXXXXXXKQXXXLFRXXXXXXXLXPXXXXXXXXXXXXXXXXXXXXXXXXXXXXXXXXXXXXXLDGXXPIXSKGRXGLSXXIIXXXXXXXXXXXXXXHXXQKXXXPXXTXXGXLXIXXXYRXXXXFXXXXXXXXXXXXXXXXXXXXXXXXXXXXXXXXXXXXXXXXXXXXXXXXXXXXXXXXXXXXXXXXXXXXXXXXXXXXXXXXXXXXXXXXXXXXXXXXXSXSXSPXXXXXXXXXXXXXXXXXXXXXXXXXXXXXXXXQPFKVGSXXXXXXXXXXXXXXXXXXXXXXXXXXXXXXXXXXXXXXXXXXXSXXSXXXXXXXXXXXXXXXXXXXXXXXXXXXXXXXXXXXXXXXXXXXXXXXXXXXXXXXXXXXXXXXXXXXXXXXXXXSSFGXXXXRRXSXXXXXXXXXXXXXXXXXXXXXXXXXXXXXXXXXXXXXXXXDXXXFVXXXXXKXXLXXXXXXXXXXXXXXXXXXXXXXXXXXXLXXXQXXXXXXXXLSXXXXXSXXXXXXXXXXXXXXXXXXXXXXXXXXXXXXXXXXXXXXXXSPXPSXXXXXXXXXXXXXXSXXXXXXXXXXXXXXXXXXXXXXXXXXXXXXXXXXXXXXXXXXXXXXXXXXXXXXXXXXXXXXXXXXXXXXXXXXXXXXXXXXXXXXXXXXXXXXXXXXXXXXXXXXXXXXXXXXXXXXXXXXXXXXXXXXXXXXXXXXXXXXXXXXXXXXXXXXXXXXXXXXXXXXXXXDDDLXFXMSDMNL

SEQ ID NO: 8414 - protein, 42 aa, Artificial sequence
  protein pattern
  Variant (3)..(3): Xaa in position 3 is Leu or Met
  Variant (4)..(5): Xaa in position 4 to 5 is Ile or Val
  Variant (7)..(7): Xaa in position 7 is any amino acid
  Variant (8)..(8): Xaa in position 8 is Phe or Tyr
  Variant (9)..(9): Xaa in position 9 is Ile or Leu
  Variant (13)..(13): Xaa in position 13 is any amino acid
  Variant (15)..(19): Xaa in position 15 to 19 is any amino acid
  Variant (20)..(20): Xaa in position 20 is any or no amino acid
  Variant (22)..(22): Xaa in position 22 is any or no amino acid
  Variant (24)..(24): Xaa in position 24 is any amino acid
  Variant (26)..(26): Xaa in position 26 is any amino acid
  Variant (27)..(27): Xaa in position 27 is Asp, Glu or Asn
  Variant (28)..(29): Xaa in position 28 to 29 is any amino acid
  Variant (30)..(30): Xaa in position 30 is Leu or Pro
  Variant (32)..(32): Xaa in position 32 is any amino acid
  Variant (34)..(34): Xaa in position 34 is Ala or Cys
  Variant (36)..(37): Xaa in position 36 to 37 is any amino acid
  Variant (38)..(38): Xaa in position 38 is any or no amino acid
  Variant (41)..(41): Xaa in position 41 is any amino acid
PPXXXEXXXDLRXLXXXXXXVXLXDXXXXXWXVXKXXXKKXE

SEQ ID NO: 8415 - protein, 34 aa, Artificial sequence
  protein pattern
  Variant (2)..(2): Xaa in position 2 is Leu or Met
  Variant (3)..(3): Xaa in position 3 is Asp, Glu, Ser or Thr
  Variant (5)..(5): Xaa in position 5 is any or no amino acid
  Variant (7)..(8): Xaa in position 7 to 8 is any amino acid
  Variant (9)..(9): Xaa in position 9 is any or no amino acid
  Variant (11)..(11): Xaa in position 11 is Ile or Val
  Variant (12)..(12): Xaa in position 12 is any amino acid
  Variant (14)..(15): Xaa in position 14 to 15 is any amino acid
  Variant (17)..(17): Xaa in position 17 is any amino acid
  Variant (19)..(19): Xaa in position 19 is Lys or Arg
  Variant (20)..(20): Xaa in position 20 is Ile or Val
  Variant (21)..(21): Xaa in position 21 is Ser or Thr
  Variant (22)..(22): Xaa in position 22 is Ile or Val
  Variant (23)..(23): Xaa in position 23 is Ala or Ser
  Variant (26)..(26): Xaa in position 26 is any amino acid
  Variant (27)..(27): Xaa in position 27 is Asp or His
  Variant (28)..(29): Xaa in position 28 to 29 is any amino acid
  Variant (31)..(31): Xaa in position 31 is any amino acid
  Variant (32)..(32): Xaa in position 32 is Phe, Ile, Leu or Val
  Variant (33)..(33): Xaa in position 33 is any amino acid
  Variant (34)..(34): Xaa in position 34 is Asp, Glu or Asn
HXXQXKXXXPXXTXXGXLXXXXXYRXXXXFXXXX

SEQ ID NO: 8416 - protein, 20 aa, Artificial sequence
  protein pattern
  Variant (4)..(5): Xaa in position 4 to 5 is any amino acid
  Variant (8)..(8): Xaa in position 8 is any or no amino acid
  Variant (10)..(10): Xaa in position 10 is any or no amino acid
  Variant (14)..(14): Xaa in position 14 is Ile or Val
  Variant (18)..(18): Xaa in position 18 is Lys or Arg
  Variant (19)..(19): Xaa in position 19 is Pro or Ser
LDGXXPIXSXKGRXGLSXXI

SEQ ID NO: 8417 - protein, 26 aa, Artificial sequence
  protein pattern
  Variant (3)..(3): Xaa in position 3 is Ala or Leu
  Variant (4)..(4): Xaa in position 4 is Ile or Val
  Variant (5)..(5): Xaa in position 5 is Ile, Leu or Val
  Variant (9)..(9): Xaa in position 9 is any amino acid
  Variant (10)..(10): Xaa in position 10 is Ile or Leu
  Variant (11)..(11): Xaa in position 11 is any amino acid
  Variant (12)..(12): Xaa in position 12 is Gly or Thr
  Variant (13)..(14): Xaa in position 13 to 14 is any amino acid
  Variant (15)..(15): Xaa in position 15 is Gln or Arg
  Variant (17)..(17): Xaa in position 17 is Leu or Met
  Variant (19)..(19): Xaa in position 19 is Ala or Thr
  Variant (20)..(20): Xaa in position 20 is any amino acid
  Variant (21)..(21): Xaa in position 21 is Asp, Glu or Lys
  Variant (22)..(22): Xaa in position 22 is Ile, Leu or Val
  Variant (23)..(25): Xaa in position 23 to 25 is any amino acid
  Variant (26)..(26): Xaa in position 26 is Leu or Pro
KQXXXLFRXXXXXXXLXPXXXXXXXX

SEQ ID NO: 8418 - protein, 15 aa, Artificial sequence
  protein pattern
  Variant (2)..(2): Xaa in position 2 is Asp, Glu or Gln
  Variant (5)..(5): Xaa in position 5 is any or no amino acid
  Variant (7)..(7): Xaa in position 7 is Leu or Val
  Variant (9)..(9): Xaa in position 9 is any amino acid
DXDDXLXFXMSDMNL

SEQ ID NO: 8419 - protein, 10 aa, Artificial sequence
  protein pattern
  Variant (2)..(2): Xaa in position 2 is Leu or Met
  Variant (7)..(7): Xaa in position 7 is Ile or Val
  Variant (9)..(9): Xaa in position 9 is Phe or Leu
  Variant (10)..(10): Xaa in position 10 is Asp or Glu
VXERWLXEXX

SEQ ID NO: 8420 - protein, 15 aa, Artificial sequence
  protein pattern
  Variant (2)..(2): Xaa in position 2 is Ile or Leu
  Variant (3)..(3): Xaa in position 3 is any amino acid
  Variant (4)..(4): Xaa in position 4 is Asp or Glu
  Variant (7)..(7): Xaa in position 7 is Lys or Arg
  Variant (8)..(8): Xaa in position 8 is any amino acid
  Variant (9)..(9): Xaa in position 9 is Ile or Leu
  Variant (10)..(10): Xaa in position 10 is Asp or Glu
  Variant (11)..(11): Xaa in position 11 is Ala, Asp, Glu or Ser
  Variant (13)..(13): Xaa in position 13 is any amino acid
  Variant (14)..(14): Xaa in position 14 is Asp or Glu
DXXXFVXXXXXKXXL

SEQ ID NO: 8421 - protein, 25 aa, Artificial sequence
  protein pattern
  Variant (2)..(2): Xaa in position 2 is any amino acid
  Variant (3)..(3): Xaa in position 3 is Lys or Arg
  Variant (4)..(4): Xaa in position 4 is Phe or Tyr
  Variant (6)..(6): Xaa in position 6 is any amino acid
  Variant (7)..(7): Xaa in position 7 is Leu or Met
  Variant (8)..(8): Xaa in position 8 is Lys or Arg
  Variant (9)..(9): Xaa in position 9 is Asn, Pro or Ser
  Variant (10)..(11): Xaa in position 10 to 11 is any amino acid
  Variant (12)..(12): Xaa in position 12 is Asp or Gln
  Variant (13)..(13): Xaa in position 13 is any amino acid
  Variant (15)..(15): Xaa in position 15 is any amino acid
  Variant (16)..(16): Xaa in position 16 is any or no amino acid
  Variant (18)..(19): Xaa in position 18 to 19 is any or no amino acid
  Variant (21)..(21): Xaa in position 21 is Met or Val
  Variant (22)..(22): Xaa in position 22 is Asn or Ser
  Variant (23)..(23): Xaa in position 23 is any amino acid
  Variant (25)..(25): Xaa in position 25 is Ile, Leu or Met
LXXXQXXXXXXXXLXXDXXSXXXSX

SEQ ID NO: 8422 - protein, 20 aa, Artificial sequence
  protein pattern
  Variant (2)..(4): Xaa in position 2 to 4 is any or no amino acid
  Variant (6)..(6): Xaa in position 6 is Asp, Gly, Asn or Gln
  Variant (7)..(7): Xaa in position 7 is any amino acid
  Variant (10)..(10): Xaa in position 10 is any amino acid
  Variant (12)..(12): Xaa in position 12 is Ala, Ser or Thr
  Variant (13)..(13): Xaa in position 13 is Ala, Thr or Val
  Variant (14)..(14): Xaa in position 14 is any amino acid
  Variant (15)..(15): Xaa in position 15 is Ile or Leu
  Variant (16)..(16): Xaa in position 16 is Ile, Leu or Val
  Variant (17)..(17): Xaa in position 17 is any amino acid
  Variant (18)..(18): Xaa in position 18 is Glu, Gln, Ser or Thr
  Variant (19)..(19): Xaa in position 19 is any amino acid
  Variant (20)..(20): Xaa in position 20 is Glu, Lys or Arg
LXXXIXXFFXKXXXXXXXXX

SEQ ID NO: 8423 - DNA, 1815 bp, Saccharomyces cerevisiae
  CDS (1)..(1815)
atgtcagatcctatagtaacgtcttccaaaatggaaaaaagtgcagagtttgaagtaacagactctgctttatataataacttcaatacattaacaacagcttcactaactccggagattaaggaacattctgaggaatctcgcaatgggttagttcacagattcgtcgactcattcagaagagccgaaagccaacgtttagaagaagacaatgacttggaggatggtaccaaatcgatgaaatctaataaccacttaaaaaagtcaatgaaatctagacatgttgtaatgatgtctttaggtacagggataggaacaggtcttctagttgccaacgccaaaggtttgagtcttgcaggcccggggtctttagtcatcggttacgttatggtgtccttcgtcacgtattttatggtccaagcggctggtgagatgggtgtcacttatccgacgcttccaggtaacttcaatgcatacaattcaatctttatttcaaagtcgtttgggttcgcgaccacttggttattttgcattcagtggttaactgtgctaccgttggaattgattacttcttccatgaccgtcaagtactggaatgacacaattaatgctgatgtattcattgtcattttctatgtgtttttattgtttatccacttttttggtgttaaggcatacggtgaaacggaatttatcttcaattcctgtaagatattgatggttgcaggattcattattttatcagtcgtcatcaattgtgggggagccggtgtggacggctatattggcggcaaatattggcgcgaccctggttcatttgcagaaggcagcggtgccactcgtttcaaagggatatgttatattctagtatctgcatatttctccttcggtggtattgaattatttgttctttccatcaatgagcagtctaaccctagaaaatccactcctgtagccgcgaagagaagtgtatatcgtattttgatcatttatttgctgacaatgattctaattgggttcaatgttcctcacaataacgatcaattgatgggttccggtggctccgcaacgcacgcttcaccatatgtcttggcagcctctattcacaaggttagggtcatcccccatatcattaatgctgttattttgatatcagtcatctctgttgcgaactctgccctttatgccgcaccgagattaatgtgttccttggctcaacagggctatgctccaaaatttttgaactatattgatagggagggaagacctttaagggccttggtagtgtgctctcttgttggtgtcgttggcttcgtcgcctgttctccacaggaagagcaagcatttacatggttggcagccattgcaggtttgagtgaacttttcacatggtcaggcattatgctttcacacattcgattcagaaaagcgatgaaagtccaaggaagatcacttgatgaagtcggctataaggccaataccggtatatggggttcatactatggggtttttttcaatatgcttgtctttatggcccaattttgggtcgcactgtctccaataggaaatggcggaaagtgtgatgctcaggcattcttcgagagttatctggctgccccgctatggatattcatgtatgttggatacatggtttacaaaagagattttacctttttaaacccactggacaagatcgacttggactttcatagaagagtttacgaccctgaaataatgaggcaggaggacgaagaaaataaagaaaggttaaagaactcttcaatattcgtcagagtctacaaattttggtgttag

SEQ ID NO: 8424 - protein, 604 aa, Saccharomyces cerevisiae
MSDPIVTSSKMEKSAEFEVTDSALYNNFNTLTTASLTPEIKEHSEESRNGLVHRFVDSFRRAESQRLEEDNDLEDGTKSMKSNNHLKKSMKSRHVVMMSLGTGIGTGLLVANAKGLSLAGPGSLVIGYVMVSFVTYFMVQAAGEMGVTYPTLPGNFNAYNSIFISKSFGFATTWLFCIQWLTVLPLELITSSMTVKYWNDTINADVFIVIFYVFLLFIHFFGVKAYGETEFIFNSCKILMVAGFIILSVVINCGGAGVDGYIGGKYWRDPGSFAEGSGATRFKGICYILVSAYFSFGGIELFVLSINEQSNPRKSTPVAAKRSVYRILIIYLLTMILIGFNVPHNNDQLMGSGGSATHASPYVLAASIHKVRVIPHIINAVILISVISVANSALYAAPRLMCSLAQQGYAPKFLNYIDREGRPLRALVVCSLVGVVGFVACSPQEEQAFTWLAAIAGLSELFTWSGIMLSHIRFRKAMKVQGRSLDEVGYKANTGIWGSYYGVFFNMLVFMAQFWVALSPIGNGGKCDAQAFFESYLAAPLWIFMYVGYMVYKRDFTFLNPLDKIDLDFHRRVYDPEIMRQEDEENKERLKNSSIFVRVYKFWC

SEQ ID NO: 8425 - DNA, 1815 bp, Saccharomyces pastorianus; identical to SEQ ID NO: 7210
  CDS (1)..(1815)

SEQ ID NO: 8426 - protein, 604 aa, Saccharomyces pastorianus; identical to SEQ ID NO: 7211

SEQ ID NO: 8427 - DNA, 1476 bp, Clostridium acetobutylicum ATCC 824; identical to SEQ ID NO: 7212
  CDS (1)..(1476): transl_table=11

SEQ ID NO: 8428 - protein, 491 aa, Clostridium acetobutylicum ATCC 824; identical to SEQ ID NO: 7213

SEQ ID NO: 8429 - DNA, 1461 bp, Listeria monocytogenes EGD-e; identical to SEQ ID NO: 7214
  CDS (1)..(1461): transl_table=11

SEQ ID NO: 8430 - protein, 486 aa, Listeria monocytogenes EGD-e; identical to SEQ ID NO: 7215

SEQ ID NO: 8431 - DNA, 1452 bp, Lactobacillus plantarum WCFS1; identical to SEQ ID NO: 7216
  CDS (1)..(1452): transl_table=11

SEQ ID NO: 8432 - protein, 483 aa, Lactobacillus plantarum WCFS1; identical to SEQ ID NO: 7217

SEQ ID NO: 8433 - DNA, 1872 bp, Candida glabrata CBS 138; identical to SEQ ID NO: 7218
  CDS (1)..(1872)

SEQ ID NO: 8434 - protein, 623 aa, Candida glabrata CBS 138; identical to SEQ ID NO: 7219

SEQ ID NO: 8435 - DNA, 1839 bp, Candida glabrata CBS 138; identical to SEQ ID NO: 7220
  CDS (1)..(1839)

SEQ ID NO: 8436 - protein, 612 aa, Candida glabrata CBS 138; identical to SEQ ID NO: 7221

SEQ ID NO: 8437 - DNA, 1983 bp, Candida glabrata CBS 138; identical to SEQ ID NO: 7222
  CDS (1)..(1983)

SEQ ID NO: 8438 - protein, 660 aa, Candida glabrata CBS 138; identical to SEQ ID NO: 7223

SEQ ID NO: 8439 - DNA, 1905 bp, Candida glabrata CBS 138; identical to SEQ ID NO: 7224
  CDS (1)..(1905)

SEQ ID NO: 8440 - protein, 634 aa, Candida glabrata CBS 138; identical to SEQ ID NO: 7225

SEQ ID NO: 8441 - DNA, 1902 bp, Zygosaccharomyces rouxii; identical to SEQ ID NO: 7226
  CDS (1)..(1902)

SEQ ID NO: 8442 - protein, 633 aa, Zygosaccharomyces rouxii; identical to SEQ ID NO: 7227

SEQ ID NO: 8443 - DNA, 1830 bp, Saccharomyces uvarum; identical to SEQ ID NO: 7228
  CDS (1)..(1830)

SEQ ID NO: 8444 - protein, 609 aa, Saccharomyces uvarum; identical to SEQ ID NO: 7229

SEQ ID NO: 8445 - DNA, 1746 bp, Penicillium chrysogenum; identical to SEQ ID NO: 7230
  CDS (1)..(1746)

SEQ ID NO: 8446 - protein, 581 aa, Penicillium chrysogenum; identical to SEQ ID NO: 7231

SEQ ID NO: 8447 - DNA, 1830 bp, Saccharomyces pastorianus; identical to SEQ ID NO: 7232
  CDS (1)..(1830)

SEQ ID NO: 8448 - protein, 609 aa, Saccharomyces pastorianus; identical to SEQ ID NO: 7233

SEQ ID NO: 8449 - DNA, 1806 bp, Saccharomyces kluyveri; identical to SEQ ID NO: 7234
  CDS (1)..(1806)

SEQ ID NO: 8450 - protein, 601 aa, Saccharomyces kluyveri; identical to SEQ ID NO: 7235

SEQ ID NO: 8451 - DNA, 1752 bp, Saccharomyces kluyveri; identical to SEQ ID NO: 7236
  CDS (1)..(1752)

SEQ ID NO: 8452 - protein, 583 aa, Saccharomyces kluyveri; identical to SEQ ID NO: 7237

SEQ ID NO: 8453 - DNA, 1788 bp, Saccharomyces castellii; identical to SEQ ID NO: 7238
  CDS (1)..(1788)

SEQ ID NO: 8454 - protein, 595 aa, Saccharomyces castellii; identical to SEQ ID NO: 7239

SEQ ID NO: 8455 - DNA, 1782 bp, Saccharomyces castellii; identical to SEQ ID NO: 7240
  CDS (1)..(1782)

SEQ ID NO: 8456 - protein, 593 aa, Saccharomyces castellii; identical to SEQ ID NO: 7241

SEQ ID NO: 8457 - DNA, 1857 bp, Saccharomyces bayanus; identical to SEQ ID NO: 7242
  CDS (1)..(1857)

SEQ ID NO: 8458 - protein, 618 aa, Saccharomyces bayanus; identical to SEQ ID NO: 7243

SEQ ID NO: 8459 - DNA, 1830 bp, Saccharomyces bayanus; identical to SEQ ID NO: 7244
  CDS (1)..(1830)

SEQ ID NO: 8460 - protein, 609 aa, Saccharomyces bayanus; identical to SEQ ID NO: 7245

SEQ ID NO: 8461 - DNA, 1902 bp, Saccharomyces bayanus; identical to SEQ ID NO: 7246
  CDS (1)..(1902)

SEQ ID NO: 8462 - protein, 633 aa, Saccharomyces bayanus; identical to SEQ ID NO: 7247

SEQ ID NO: 8463 - DNA, 1902 bp, Saccharomyces cerevisiae; identical to SEQ ID NO: 7248
  CDS (1)..(1902)

SEQ ID NO: 8464 - protein, 633 aa, Saccharomyces cerevisiae; identical to SEQ ID NO: 7249

SEQ ID NO: 8465 - DNA, 1830 bp, Saccharomyces cerevisiae; identical to SEQ ID NO: 7250
  CDS (1)..(1830)

SEQ ID NO: 8466 - protein, 609 aa, Saccharomyces cerevisiae; identical to SEQ ID NO: 7251

SEQ ID NO: 8467 - DNA, 1779 bp, Saccharomyces cerevisiae; identical to SEQ ID NO: 7252
  CDS (1)..(1779)

SEQ ID NO: 8468 - protein, 592 aa, Saccharomyces cerevisiae; identical to SEQ ID NO: 7253

SEQ ID NO: 8469 - DNA, 1860 bp, Saccharomyces cerevisiae; identical to SEQ ID NO: 7254
  CDS (1)..(1860)

SEQ ID NO: 8470 - protein, 619 aa, Saccharomyces cerevisiae; identical to SEQ ID NO: 7255

SEQ ID NO: 8471 - DNA, 1746 bp, Schizosaccharomyces pombe; identical to SEQ ID NO: 7256
  CDS (1)..(1746)

SEQ ID NO: 8472 - protein, 581 aa, Schizosaccharomyces pombe; identical to SEQ ID NO: 7257

SEQ ID NO: 8473 - DNA, 1758 bp, Schizosaccharomyces pombe; identical to SEQ ID NO: 7258
  CDS (1)..(1758)

SEQ ID NO: 8474 - protein, 585 aa, Schizosaccharomyces pombe; identical to SEQ ID NO: 7259

SEQ ID NO: 8475 - DNA, 1743 bp, Schizosaccharomyces pombe; identical to SEQ ID NO: 7260
  CDS (1)..(1743)

SEQ ID NO: 8476 - protein, 580 aa, Schizosaccharomyces pombe; identical to SEQ ID NO: 7261

SEQ ID NO: 8477 - DNA, 1752 bp, Schizosaccharomyces pombe; identical to SEQ ID NO: 7262
  CDS (1)..(1752)

SEQ ID NO: 8478 - protein, 583 aa, Schizosaccharomyces pombe; identical to SEQ ID NO: 7263

SEQ ID NO: 8479 - DNA, 25 bp, Artificial sequence
  primer
atgtcagatcctatagtaacgtctt

SEQ ID NO: 8480 - DNA, 25 bp, Artificial sequence
  primer
ctaacaccaaaatttgtagactctg

SEQ ID NO: 8481 - protein, 608 aa, Artificial sequence; identical to SEQ ID NO: 7266
  consensus sequence
  Variant (2)..(4): Xaa in position 2 to 4 is any amino acid
  Variant (6)..(13): Xaa in position 6 to 13 is any amino acid
  Variant (14)..(57): Xaa in position 14 to 57 is any or no amino acid
  Variant (60)..(64): Xaa in position 60 to 64 is any amino acid
  Variant (67)..(68): Xaa in position 67 to 68 is any amino acid
  Variant (70)..(72): Xaa in position 70 to 72 is any amino acid
  Variant (74)..(75): Xaa in position 74 to 75 is any amino acid
  Variant (81)..(81): Xaa in position 81 is any amino acid
  Variant (83)..(87): Xaa in position 83 to 87 is any amino acid
  Variant (89)..(91): Xaa in position 89 to 91 is any amino acid
  Variant (94)..(97): Xaa in position 94 to 97 is any amino acid
  Variant (99)..(99): Xaa in position 99 is any amino acid
  Variant (101)..(107): Xaa in position 101 to 107 is any amino acid
  Variant (109)..(112): Xaa in position 109 to 112 is any amino acid
  Variant (114)..(114): Xaa in position 114 is any amino acid
  Variant (117)..(124): Xaa in position 117 to 124 is any amino acid
  Variant (125)..(125): Xaa in position 125 is any or no amino acid
  Variant (127)..(127): Xaa in position 127 is any amino acid
  Variant (129)..(130): Xaa in position 129 to 130 is any amino acid
  Variant (132)..(140): Xaa in position 132 to 140 is any amino acid
  Variant (144)..(145): Xaa in position 144 to 145 is any amino acid
  Variant (147)..(151): Xaa in position 147 to 151 is any amino acid
  Variant (153)..(156): Xaa in position 153 to 156 is any amino acid
  Variant (161)..(161): Xaa in position 161 is any amino acid
  Variant (163)..(165): Xaa in position 163 to 165 is any amino acid
  Variant (167)..(169): Xaa in position 167 to 169 is any amino acid
  Variant (171)..(180): Xaa in position 171 to 180 is any amino acid
  Variant (181)..(181): Xaa in position 181 is any or no amino acid
  Variant (184)..(189): Xaa in position 184 to 189 is any amino acid
  Variant (191)..(192): Xaa in position 191 to 192 is any amino acid
  Variant (195)..(197): Xaa in position 195 to 197 is any amino acid
  Variant (198)..(198): Xaa in position 198 is any or no amino acid
  Variant (200)..(200): Xaa in position 200 is any amino acid
  Variant (202)..(202): Xaa in position 202 is any amino acid
  Variant (205)..(205): Xaa in position 205 is any amino acid
  Variant (207)..(209): Xaa in position 207 to 209 is any amino acid
  Variant (211)..(215): Xaa in position 211 to 215 is any amino acid
  Variant (218)..(218): Xaa in position 218 is any amino acid
  Variant (221)..(226): Xaa in position 221 to 226 is any amino acid
  Variant (229)..(233): Xaa in position 229 to 233 is any amino acid
  Variant (234)..(236): Xaa in position 234 to 236 is any or no amino acid
  Variant (239)..(245): Xaa in position 239 to 245 is any amino acid
  Variant (246)..(247): Xaa in position 246 to 247 is any or no amino acid
  Variant (249)..(251): Xaa in position 249 to 251 is any amino acid
  Variant (252)..(256): Xaa in position 252 to 256 is any or no amino acid
  Variant (259)..(266): Xaa in position 259 to 266 is any amino acid
  Variant (268)..(268): Xaa in position 268 is any amino acid
  Variant (270)..(272): Xaa in position 270 to 272 is any amino acid
  Variant (274)..(274): Xaa in position 274 is any amino acid
  Variant (276)..(278): Xaa in position 276 to 278 is any amino acid
  Variant (280)..(282): Xaa in position 280 to 282 is any amino acid
  Variant (284)..(285): Xaa in position 284 to 285 is any amino acid
  Variant (288)..(288): Xaa in position 288 is any amino acid
  Variant (290)..(291): Xaa in position 290 to 291 is any amino acid
  Variant (293)..(293): Xaa in position 293 is any amino acid
  Variant (295)..(295): Xaa in position 295 is any amino acid
  Variant (297)..(300): Xaa in position 297 to 300 is any amino acid
  Variant (303)..(305): Xaa in position 303 to 305 is any amino acid
  Variant (307)..(313): Xaa in position 307 to 313 is any amino acid
  Variant (315)..(316): Xaa in position 315 to 316 is any amino acid
  Variant (319)..(323): Xaa in position 319 to 323 is any amino acid
  Variant (325)..(325): Xaa in position 325 is any amino acid
  Variant (327)..(332): Xaa in position 327 to 332 is any amino acid
  Variant (333)..(335): Xaa in position 333 to 335 is any or no amino acid
  Variant (338)..(338): Xaa in position 338 is any amino acid
  Variant (340)..(340): Xaa in position 340 is any amino acid
  Variant (342)..(350): Xaa in position 342 to 350 is any amino acid
  Variant (352)..(354): Xaa in position 352 to 354 is any amino acid
  Variant (360)..(360): Xaa in position 360 is any amino acid
  Variant (363)..(363): Xaa in position 363 is any amino acid
  Variant (365)..(366): Xaa in position 365 to 366 is any amino acid
  Variant (369)..(370): Xaa in position 369 to 370 is any amino acid
  Variant (372)..(374): Xaa in position 372 to 374 is any amino acid
  Variant (376)..(379): Xaa in position 376 to 379 is any amino acid
  Variant (381)..(383): Xaa in position 381 to 383 is any amino acid
  Variant (385)..(385): Xaa in position 385 is any amino acid
  Variant (389)..(391): Xaa in position 389 to 391 is any amino acid
  Variant (393)..(393): Xaa in position 393 is any amino acid
  Variant (396)..(396): Xaa in position 396 is any amino acid
  Variant (400)..(401): Xaa in position 400 to 401 is any amino acid
  Variant (403)..(413): Xaa in position 403 to 413 is any amino acid
  Variant (415)..(423): Xaa in position 415 to 423 is any amino acid
  Variant (424)..(429): Xaa in position 424 to 429 is any or no amino acid
  Variant (431)..(431): Xaa in position 431 is any amino acid
  Variant (434)..(434): Xaa in position 434 is any amino acid
  Variant (437)..(437): Xaa in position 437 is any amino acid
  Variant (441)..(442): Xaa in position 441 to 442 is any amino acid
  Variant (444)..(444): Xaa in position 444 is any amino acid
  Variant (446)..(447): Xaa in position 446 to 447 is any amino acid
  Variant (449)..(450): Xaa in position 449 to 450 is any amino acid
  Variant (453)..(453): Xaa in position 453 is any amino acid
  Variant (457)..(457): Xaa in position 457 is any amino acid
  Variant (459)..(461): Xaa in position 459 to 461 is any amino acid
  Variant (464)..(464): Xaa in position 464 is any amino acid
  Variant (467)..(467): Xaa in position 467 is any amino acid
  Variant (469)..(469): Xaa in position 469 is any amino acid
  Variant (471)..(475): Xaa in position 471 to 475 is any amino acid
  Variant (477)..(478): Xaa in position 477 to 478 is any amino acid
  Variant (481)..(493): Xaa in position 481 to 493 is any amino acid
  Variant (496)..(496): Xaa in position 496 is any amino acid
  Variant (498)..(500): Xaa in position 498 to 500 is any amino acid
  Variant (502)..(503): Xaa in position 502 to 503 is any amino acid
  Variant (504)..(508): Xaa in position 504 to 508 is any or no amino acid
  Variant (510)..(512): Xaa in position 510 to 512 is any amino acid
  Variant (513)..(515): Xaa in position 513 to 515 is any or no amino acid
  Variant (518)..(519): Xaa in position 518 to 519 is any amino acid
  Variant (523)..(523): Xaa in position 523 is any amino acid
  Variant (525)..(531): Xaa in position 525 to 531 is any amino acid
  Variant (534)..(547): Xaa in position 534 to 547 is any amino acid
  Variant (548)..(553): Xaa in position 548 to 553 is any or no amino acid
  Variant (556)..(586): Xaa in position 556 to 586 is any amino acid
  Variant (587)..(607): Xaa in position 587 to 607 is any or no amino acid

SEQ ID NO: 8482 - protein, 60 aa, Artificial sequence; identical to SEQ ID NO: 7267
  protein pattern
  Variant (3)..(3): Xaa in position 3 is any amino acid
  Variant (5)..(5): Xaa in position 5 is Ile, Leu or Val
  Variant (7)..(7): Xaa in position 7 is Ala, Ile or Val
  Variant (8)..(11): Xaa in position 8 to 11 is any amino acid
  Variant (12)..(12): Xaa in position 12 is Ile or Val
  Variant (13)..(13): Xaa in position 13 is Lys or Arg
  Variant (14)..(14): Xaa in position 14 is Ala, Gly, Ile or Val
  Variant (15)..(15): Xaa in position 15 is Ala, Ile, Leu or Val
  Variant (17)..(17): Xaa in position 17 is any amino acid
  Variant (18)..(18): Xaa in position 18 is Phe, Ile, Leu or Val
  Variant (19)..(19): Xaa in position 19 is Phe, Ile or Val
  Variant (24)..(24): Xaa in position 24 is Ile or Leu
  Variant (25)..(25): Xaa in position 25 is Ile, Leu or Met
  Variant (26)..(26): Xaa in position 26 is Ala or Ser
  Variant (27)..(28): Xaa in position 27 to 28 is any amino acid
  Variant (30)..(30): Xaa in position 30 is Met or Val
  Variant (31)..(31): Xaa in position 31 is Ala, Gly, Ser or Thr
  Variant (34)..(34): Xaa in position 34 is Ala, Cys, Ser or Thr
  Variant (35)..(35): Xaa in position 35 is any amino acid
  Variant (36)..(36): Xaa in position 36 is Phe or Tyr
  Variant (37)..(37): Xaa in position 37 is any amino acid
  Variant (38)..(38): Xaa in position 38 is Ala, Gly or Ser
  Variant (39)..(39): Xaa in position 39 is Ala, Gly, Pro or Ser
  Variant (41)..(41): Xaa in position 41 is any amino acid
  Variant (42)..(42): Xaa in position 42 is Phe, Ile, Leu or Met
  Variant (43)..(43): Xaa in position 43 is any amino acid
  Variant (44)..(44): Xaa in position 44 is Ala, Gly, Ser or Thr
  Variant (45)..(45): Xaa in position 45 is Leu or Met
  Variant (46)..(46): Xaa in position 46 is Ala or Ser
  Variant (47)..(50): Xaa in position 47 to 50 is any amino acid
  Variant (51)..(51): Xaa in position 51 is Ala, Gly, Ile or Leu
  Variant (53)..(54): Xaa in position 53 to 54 is any amino acid
  Variant (55)..(55): Xaa in position 55 is Phe or Leu
  Variant (56)..(56): Xaa in position 56 is any amino acid
  Variant (58)..(58): Xaa in position 58 is any amino acid

SEQ ID NO: 8483 - protein, 44 aa, Artificial sequence; identical to SEQ ID NO: 7268
  protein pattern
  Variant (2)..(3): Xaa in position 2 to 3 is any amino acid
  Variant (5)..(5): Xaa in position 5 is any amino acid
  Variant (7)..(7): Xaa in position 7 is Ile or Leu
  Variant (8)..(8): Xaa in position 8 is Ala or Ser
  Variant (9)..(9): Xaa in position 9 is Gly or Ser
  Variant (10)..(10): Xaa in position 10 is Ile or Leu
  Variant (11)..(11): Xaa in position 11 is Ala or Ser
  Variant (12)..(12): Xaa in position 12 is Glu, Asn, Gln, Ser or Thr
  Variant (13)..(13): Xaa in position 13 is any amino acid
  Variant (14)..(14): Xaa in position 14 is Phe or Ile
  Variant (15)..(15): Xaa in position 15 is any amino acid
  Variant (16)..(16): Xaa in position 16 is Trp or Tyr
  Variant (17)..(17): Xaa in position 17 is any amino acid
  Variant (18)..(18): Xaa in position 18 is Ala, Gly or Ser
  Variant (19)..(19): Xaa in position 19 is Ile or Met
  Variant (20)..(20): Xaa in position 20 is any amino acid
  Variant (21)..(21): Xaa in position 21 is Phe, Leu or Val
  Variant (22)..(22): Xaa in position 22 is Cys or Ser
  Variant (24)..(24): Xaa in position 24 is Phe, Ile, Leu or Val
  Variant (25)..(25): Xaa in position 25 is any amino acid
  Variant (26)..(26): Xaa in position 26 is Phe or Met
  Variant (28)..(28): Xaa in position 28 is any amino acid
  Variant (29)..(29): Xaa in position 29 is Ala or Cys
  Variant (30)..(30): Xaa in position 30 is Phe or Met
  Variant (31)..(35): Xaa in position 31 to 35 is any amino acid
  Variant (37)..(38): Xaa in position 37 to 38 is any amino acid
  Variant (39)..(39): Xaa in position 39 is Glu, Gln or Thr
  Variant (40)..(40): Xaa in position 40 is Ile, Leu or Val
  Variant (41)..(41): Xaa in position 41 is Glu or Gly
  Variant (42)..(42): Xaa in position 42 is Phe or Tyr
  Variant (43)..(43): Xaa in position 43 is any amino acid
  Variant (44)..(44): Xaa in position 44 is Ala or Ser

SEQ ID NO: 8484 - protein, 61 aa, Artificial sequence; identical to SEQ ID NO: 7269
  protein pattern
  Variant (2)..(4): Xaa in position 2 to 4 is any amino acid
  Variant (5)..(5): Xaa in position 5 is Ile, Leu or Met
  Variant (6)..(7): Xaa in position 6 to 7 is any amino acid
  Variant (10)..(10): Xaa in position 10 is Ile, Leu, Met or Val
  Variant (11)..(11): Xaa in position 11 is any amino acid
  Variant (12)..(12): Xaa in position 12 is Phe, Leu or Met
  Variant (13)..(13): Xaa in position 13 is Ile or Met
  Variant (14)..(14): Xaa in position 14 is Ala, Cys, Gly, Ser or Thr
  Variant (15)..(15): Xaa in position 15 is Ile, Leu or Val
  Variant (17)..(17): Xaa in position 17 is any or no amino acid
  Variant (19)..(19): Xaa in position 19 is any amino acid
  Variant (20)..(20): Xaa in position 20 is any or no amino acid
  Variant (22)..(22): Xaa in position 22 is Ser or Thr
  Variant (24)..(24): Xaa in position 24 is Leu or Val
  Variant (25)..(25): Xaa in position 25 is any amino acid
  Variant (26)..(26): Xaa in position 26 is Phe or Val
  Variant (27)..(27): Xaa in position 27 is Ala or Gly
  Variant (28)..(28): Xaa in position 28 is Asn or Ser
  Variant (29)..(29): Xaa in position 29 is Ala, Gly or Ser
  Variant (30)..(30): Xaa in position 30 is any amino acid
  Variant (31)..(31): Xaa in position 31 is Ala, Gly, Ser, Thr or Val
  Variant (32)..(32): Xaa in position 32 is Phe, Ile or Leu
  Variant (33)..(34): Xaa in position 33 to 34 is any amino acid
  Variant (35)..(35): Xaa in position 35 is Ala or Gly
  Variant (37)..(37): Xaa in position 37 is Ala or Pro
  Variant (38)..(38): Xaa in position 38 is Ala, Gly or Leu
  Variant (39)..(39): Xaa in position 39 is Ala, Gly or Ser
  Variant (40)..(40): Xaa in position 40 is Ala, Leu or Val
  Variant (41)..(41): Xaa in position 41 is Ile, Leu or Val
  Variant (42)..(42): Xaa in position 42 is Ile or Leu
  Variant (43)..(43): Xaa in position 43 is Ala, Asp, Gly or Asn
  Variant (44)..(44): Xaa in position 44 is Trp or Tyr
  Variant (45)..(45): Xaa in position 45 is any amino acid
  Variant (46)..(46): Xaa in position 46 is Ile, Leu or Met
  Variant (47)..(47): Xaa in position 47 is any amino acid
  Variant (48)..(48): Xaa in position 48 is Gly or Ser
  Variant (49)..(54): Xaa in position 49 to 54 is any amino acid
  Variant (55)..(55): Xaa in position 55 is Ile, Met or Val
  Variant (56)..(56): Xaa in position 56 is any amino acid
  Variant (57)..(57): Xaa in position 57 is Ala, Gly or Ser
  Variant (58)..(58): Xaa in position 58 is any amino acid
  Variant (61)..(61): Xaa in position 61 is Ile, Leu or Met

SEQ ID NO: 8485 - protein, 39 aa, Artificial sequence; identical to SEQ ID NO: 7270
  protein pattern
  Variant (2)..(2): Xaa in position 2 is any or no amino acid
  Variant (4)..(4): Xaa in position 4 is Ala, Ser or Val
  Variant (5)..(5): Xaa in position 5 is any amino acid
  Variant (6)..(6): Xaa in position 6 is Ala or Gly
  Variant (8)..(8): Xaa in position 8 is Ala or Gly
  Variant (10)..(10): Xaa in position 10 is any amino acid
  Variant (13)..(13): Xaa in position 13 is Phe, Ile, Leu, Met or Val
  Variant (14)..(14): Xaa in position 14 is Phe, Leu or Met
  Variant (15)..(15): Xaa in position 15 is Asn or Ser
  Variant (16)..(17): Xaa in position 16 to 17 is any amino acid
  Variant (19)..(19): Xaa in position 19 is Ile or Val
  Variant (20)..(23): Xaa in position 20 to 23 is any amino acid
  Variant (26)..(26): Xaa in position 26 is any or no amino acid
  Variant (28)..(28): Xaa in position 28 is Ile or Leu
  Variant (29)..(30): Xaa in position 29 to 30 is any amino acid
  Variant (31)..(31): Xaa in position 31 is Ala, Ile or Val
  Variant (32)..(32): Xaa in position 32 is Ile or Val
  Variant (33)..(33): Xaa in position 33 is any amino acid
  Variant (34)..(34): Xaa in position 34 is Ala, Cys, Asp, Asn, Thr or Val
  Variant (35)..(35): Xaa in position 35 is Ala, Cys or Gly
  Variant (37)..(37): Xaa in position 37 is any or no amino acid
  Variant (39)..(39): Xaa in position 39 is Ala, Asp, Gly, Asn, Thr or Val

SEQ ID NO: 8486 - protein, 39 aa, Artificial sequence; identical to SEQ ID NO: 7271
  protein pattern
  Variant (3)..(3): Xaa in position 3 is any amino acid
  Variant (4)..(4): Xaa in position 4 is Glu, Lys or Arg
  Variant (5)..(5): Xaa in position 5 is Ala, Asn, Ser or Thr
  Variant (6)..(6): Xaa in position 6 is any amino acid
  Variant (8)..(8): Xaa in position 8 is any amino acid
  Variant (10)..(10): Xaa in position 10 is any amino acid
  Variant (12)..(15): Xaa in position 12 to 15 is any or no amino acid
  Variant (17)..(17): Xaa in position 17 is Ile or Val
  Variant (18)..(18): Xaa in position 18 is Ala, Ile, Leu or Val
  Variant (19)..(19): Xaa in position 19 is any amino acid
  Variant (20)..(20): Xaa in position 20 is Phe, Ile, Leu or Val
  Variant (21)..(21): Xaa in position 21 is Phe or Tyr
  Variant (22)..(22): Xaa in position 22 is Ile, Leu, Met or Val
  Variant (23)..(23): Xaa in position 23 is any amino acid
  Variant (24)..(24): Xaa in position 24 is Ala, Ser or Thr
  Variant (25)..(26): Xaa in position 25 to 26 is any amino acid
  Variant (27)..(27): Xaa in position 27 is Ile or Leu
  Variant (28)..(28): Xaa in position 28 is Ile, Leu or Val
  Variant (29)..(29): Xaa in position 29 is Cys or Gly
  Variant (30)..(30): Xaa in position 30 is Phe or Leu
  Variant (31)..(31): Xaa in position 31 is any amino acid
  Variant (32)..(32): Xaa in position 32 is Ile or Val
  Variant (33)..(34): Xaa in position 33 to 34 is any amino acid
  Variant (35)..(35): Xaa in position 35 is Asp or Asn
  Variant (36)..(36): Xaa in position 36 is Asp, Asn or Ser
  Variant (37)..(37): Xaa in position 37 is any amino acid
  Variant (38)..(38): Xaa in position 38 is Glu, Asn, Gln or Arg

SEQ ID NO: 8487 - protein, 24 aa, Artificial sequence
  protein pattern
  Variant (3)..(3): Xaa in position 3 is any amino acid
  Variant (4)..(4): Xaa in position 4 is any or no amino acid
  Variant (8)..(8): Xaa in position 8 is any amino acid
  Variant (9)..(9): Xaa in position 9 is Cys or Pro
  Variant (10)..(10): Xaa in position 10 is Ile, Leu or Val
  Variant (11)..(11): Xaa in position 11 is any amino acid
  Variant (12)..(12): Xaa in position 12 is Ile or Leu
  Variant (13)..(14): Xaa in position 13 to 14 is any amino acid
  Variant (15)..(15): Xaa in position 15 is Phe or Tyr
  Variant (16)..(16): Xaa in position 16 is Phe, Ile, Leu or Val
  Variant (18)..(18): Xaa in position 18 is His or Tyr
  Variant (19)..(22): Xaa in position 19 to 22 is any amino acid
  Variant (23)..(23): Xaa in position 23 is Lys or Arg
  Variant (24)..(24): Xaa in position 24 is Asp, Glu, Ser or Thr
FFXXYLAXXXXXXXXXGXXXXXXX

SEQ ID NO: 8488 - protein, 27 aa, Artificial sequence
  protein pattern
  Variant (3)..(3): Xaa in position 3 is Gly or Asn
  Variant (4)..(4): Xaa in position 4 is Phe, Ile, Leu or Val
  Variant (5)..(7): Xaa in position 5 to 7 is any amino acid
  Variant (8)..(8): Xaa in position 8 is Phe, Leu or Met
  Variant (9)..(9): Xaa in position 9 is Cys, Thr or Val
  Variant (10)..(10): Xaa in position 10 is any amino acid
  Variant (11)..(11): Xaa in position 11 is Ala, Gly or Ser
  Variant (12)..(12): Xaa in position 12 is any amino acid
  Variant (14)..(14): Xaa in position 14 is Ala or Ser
  Variant (15)..(15): Xaa in position 15 is Phe or Tyr
  Variant (16)..(16): Xaa in position 16 is Ala, Gly or Ser
  Variant (17)..(17): Xaa in position 17 is Ala or Gly
  Variant (18)..(18): Xaa in position 18 is any amino acid
  Variant (20)..(20): Xaa in position 20 is any amino acid
  Variant (21)..(21): Xaa in position 21 is Phe, Ile, Leu, Met or Val
  Variant (22)..(22): Xaa in position 22 is any amino acid
  Variant (23)..(23): Xaa in position 23 is Ile, Leu or Val
  Variant (24)..(24): Xaa in position 24 is Ala, Ser or Thr
  Variant (25)..(25): Xaa in position 25 is any amino acid
  Variant (26)..(26): Xaa in position 26 is Ala, Asn, Gln or Ser
FKXXXXXXXXXXFXXXXXEXXXXXXXE

SEQ ID NO: 8489 - DNA, 1497 bp, Brassica napus; identical to SEQ ID NO: 53
  CDS (1)..(1497)

SEQ ID NO: 8490 - protein, 498 aa, Brassica napus; identical to SEQ ID NO: 54

SEQ ID NO: 8491 - DNA, 1548 bp, Zea mays
  CDS (1)..(1548)
atggcgaacatcgacatggcgaagatcctggcggacctggaccgcggcgccagcggcggcgacgcgcgggtgcccaagaccaagctcgtatgcacgctcggcccggcctcccgcaccgtgcccatgctcgagaagctgctccgcgccggcatgaacgtcgcgcgcttcaacttctcccacggcacccacgagtaccaccaggagacgctcgacaacctccgccaggccatgcacaacaccggcatcctctgcgccgtcatgctcgacaccaagggtcctgagatccgtacagggtttttgaaggatggtaaaccgattaagctaaccaagggtcaagaaatcactgtcaccactgattatgatatcaagggtgacgaaaatacgattgctatgagttacaagaaactgcctgttgacgtgaagcctggaaatgtcatactctgcgcagatggtactatctctctggccgttctatcttgtgatcctgatgctggaactgtgaggtgtagatgcgagaacactgcaatgcttggtgagagaaagaactgcaatctgccaggaattgttgtggatcttcctacattgactgagaaagataaagaagacattttgggctggggtgttccaaatgatattgacatgattgctctatcctttgtccgtaaaggatcagatttggtgactgtgagacaggttcttgggcagcatgccaagcgcattaagttgatgtcaaaggttgaaaaccaagagggtgttgtaaactttgatgagatcttgagggagactgatgcttttatggttgctagaggtgatcttggaatggagattcctgttgagaagattttccttgcgcagaagatgatgatctacaagtgcaacattgctggcaaacctgttgttaccgctacccagatgctcgagtcgatgatcaaatcccctaggcccacccgcgcagaggccactgacgttgcaaatgctgttcttgatggaactgactgtgtcatgctcagtggtgagagtgctgctggagcctaccccgaggtggctgtgaagatcatggctcgtatctgcatcgaggcagagtcttccctggaccacgaggcagttttcaaggccatgatcaggtccgcgcctcttccaatgagccctctggagtctcttgcatcatctgctgtgcgaactgccaacaaggccaaggccgcactgatcgtcgtcttgactcgcggtggcaccacggccaaactggtcgccaagtaccgccccagggttcccatcctctctgttgtggtacccgtgctaacgacggattctttcgactggaccatcagctccgagggcccagctaggcacagcctgatctatagaggcctcattcccctcctcgctgagggctccgcgaaggctacggattcagagtcaaccgaggtgatcctggaggctgcgctcaagtcggccgtgcagaagcaactttgcaagcctggtgatgccattgtggctctccatcgtatcggcgtcgcctccgtcatcaagatctgcatcgtgaagtga

SEQ ID NO: 8492 - protein, 515 aa, Zea mays
MANIDMAKILADLDRGASGGDARVPKTKLVCTLGPASRTVPMLEKLLRAGMNVARFNFSHGTHEYHQETLDNLRQAMHNTGILCAVMLDTKGPEIRTGFLKDGKPIKLTKGQEITVTTDYDIKGDENTIAMSYKKLPVDVKPGNVILCADGTISLAVLSCDPDAGTVRCRCENTAMLGERKNCNLPGIVVDLPTLTEKDKEDILGWGVPNDIDMIALSFVRKGSDLVTVRQVLGQHAKRIKLMSKVENQEGVVNFDEILRETDAFMVARGDLGMEIPVEKIFLAQKMMIYKCNIAGKPVVTATQMLESMIKSPRPTRAEATDVANAVLDGTDCVMLSGESAAGAYPEVAVKIMARICIEAESSLDHEAVFKAMIRSAPLPMSPLESLASSAVRTANKAKAALIVVLTRGGTTAKLVAKYRPRVPILSVVVPVLTTDSFDWTISSEGPARHSLIYRGLIPLLAEGSAKATDSESTEVILEAALKSAVQKQLCKPGDAIVALHRIGVASVIKICIVK

SEQ ID NO: 8493 - DNA, 1584 bp, Glycine max
  CDS (1)..(1584)
atgccttccagtcacttgcttctcgaggaacctattaggatggtctccatccttgagccatccaagcctagttttttctctgcaatgacaaagattgttggtaccctgggacctaaatctagatccgtcgaaaccatttctggttgcctcaaggctggcatgtctgtggctcgttttgacttttcatggcatgaccctgagtaccaccaggagactttggagaatttgaaggctgctatcaagagtactaagaagctctgtgctgttatgctggacacagtgggcgctgagatgcaggttgttaacaaaagtgagagagcaatctcgctcgaggcaaatggtctggttgttctaactcctgatcagggacaagaagcctcttcagagatattgcctatcaattttgatggactggctaaggcagtgaagaagggagacaccatttttattggtcaatacttgttcacgggaagtgaaactacttctgtatggctagaggtatctgaagtcaaagggcaagatgttgtttgtattataaagaacacagctacattggctgggtcattgttcactttgcatgcctctcaaattcatattgatttgcctactctcactgagaaagacaaggaggttataagcacctggggtgttaaaaacaaaattgattttctgtcactgtcatatactcggcacgctaaagacgttcgccaggctcgcgaatttctttccaagttaggtgatctcagccagactcaaatttttgcaaagattgaaaatgttgagggattgacccattttgatgagattcttcaagaagctgacggtattatcctttcccgtgggaatttgggtattgatcttccaccagagaaggtgtttttgtttcaaaaatctgccctttacaagtgtaacatggctgggaaacctgctgtgcttacacgtgttgtggatagcatgactgacaacttgagaccaactcgtgctgaagccacagatgttgccaatgctgttttagatggaagtgatgccatacttctgggtgctgagactttacgtgggttgtaccctattgagactatttctactgttggcagaatttgttctgaggctgagaaagttttcaatcaagacctttattttaagaggacagtcaagtatgttggagaacccatgacccacttggaatctattgcatcctctgcggtacgggctgcaattaaggtgaaagcatctattataatttgtttcacttcatcaggaagggctgcaagattgatcgcaaagtataggccaacaatgccagtactatctgttgtgatcccccgactcaagacaaatcagctaaagtggagctttagtggagcttttgaggcaagacaatcacttatcgtgagaggtctctttcctatgcttgcagatccacgacatcctgctgagtcaacaagtgcaacaaatgagtctattcttaaggttgcccttgatcatggaaaatcattgggagttattaagtcacatgaccgggtagttgtttgccagaaacttggtgatgcatctgtggttaagattattgagcttgaagattaa

SEQ ID NO: 8494 - protein, 527 aa, Glycine max
MPSSHLLLEEPIRMVSILEPSKPSFFSAMTKIVGTLGPKSRSVETISGCLKAGMSVARFDFSWHDPEYHQETLENLKAAIKSTKKLCAVMLDTVGAEMQVVNKSERAISLEANGLVVLTPDQGQEASSEILPINFDGLAKAVKKGDTIFIGQYLFTGSETTSVWLEVSEVKGQDVVCIIKNTATLAGSLFTLHASQIHIDLPTLTEKDKEVISTWGVKNKIDFLSLSYTRHAKDVRQAREFLSKLGDLSQTQIFAKIENVEGLTHFDEILQEADGIILSRGNLGIDLPPEKVFLFQKSALYKCNMAGKPAVLTRVVDSMTDNLRPTRAEATDVANAVLDGSDAILLGAETLRGLYPIETISTVGRICSEAEKVFNQDLYFKRTVKYVGEPMTHLESIASSAVRAAIKVKASIIICFTSSGRAARLIAKYRPTMPVLSVVIPRLKTNQLKWSFSGAFEARQSLIVRGLFPMLADPRHPAESTSATNESILKVALDHGKSLGVIKSHDRVVVCQKLGDASVVKIIELED

SEQ ID NO: 8495 - DNA, 1584 bp, Hordeum vulgare
  CDS (1)..(1584)
atgcattccaccaatctgctcctcgaggagcccatccggatggtctccatcctcgagccgtccaaaccgaacttcttcccggcgatgacgaagatcgtggggacgctgggtcccaagtcccggtccgttgaggccatctccgcctgcctgaaggccggcatgtctgtggcacgtttcgatttctcgtggggggatgccgcgtaccaccaggagacactcgagaacctcaagatcgccatcaaggccaccaagaagctatgcgctgttatgcttgacactgttggccccgagttgcaagtggtgaacaagagtgaggtcacaatctcgcttgaagagaacgagtctgttgttctcacccctcacaaaggccaggaggcctcttccaaattgctccctatcaacttctctggactcgccaaggctgtgaagcccggagccacaatatttgttgggcaatatttgttcacgggcagtgagactacatcagtttggctggaggtttctgaagttcaaggggatgacgtggtttgtgtgatcaagaactcagctaccctggctgggtcactcttcacattgcactgctcccagatccatatcgacatgcccacgctgtctgatgaggataaagatgttatgaagaaatggggtgctccaaacaaaattgacttcctctctctttcttatacaaggcatgcagaagatgtgcggcaagcacgggagttcctctcaaagttaggtgatcttagccaaactctgatttttgccaaaattgagaatgtggagggcttgaaccattttgatgagatcctggaagaagcagatggtataattctgtcaagagggaaccttggaattgatcttccacctgaaaaggtgtttttatttcagaagtctgctctgcacaagtgcaacatggctggaaagcctgctgttgttactcgtgttgtggacagtatgacagacaacctaaggcctactcgtgcggaggcaactgatgtggcaaatgcagtgctggatggcagtgatgccattctccttggtgctgagactctccgtgggctgtatccagttgagactatttcaacagtgggcagaatttgtgctgaggctgagaaggtcttcaaccaagatttgtacttcaagcgaaccgtgaaatacgttggagaacccatgacccacttggagtctattgcttcctctgcagtgcgggcggctatcaaagttaaggcttcggtcatcatttgcttcacctcatctggacgagctgcaaggctaattgccaagtacaggcccaccatgcctgtcctgtctgttgtcattcctcgtctaaaaacaaatcaattgaagtggagcttcacaggcgcatttgaagcaagacaatcactcatagttagaggcctctttcccatgcttgctgatccacgtcaccccgctgaatctactagtactacaaatgaatctgtgttgaaggttgctcttgaccatggcaaagcatccggtgtgatcaaatcgcatgaccgtgttgttgtgtgccagaaagtgggagattcctctgtcgtgaagatcattgagctggacgactag

SEQ ID NO: 8496 - protein, 527 aa, Hordeum vulgare
MHSTNLLLEEPIRMVSILEPSKPNFFPAMTKIVGTLGPKSRSVEAISACLKAGMSVARFDFSWGDAAYHQETLENLKIAIKATKKLCAVMLDTVGPELQVVNKSEVTISLEENESVVLTPHKGQEASSKLLPINFSGLAKAVKPGATIFVGQYLFTGSETTSVWLEVSEVQGDDVVCVIKNSATLAGSLFTLHCSQIHIDMPTLSDEDKDVMKKWGAPNKIDFLSLSYTRHAEDVRQAREFLSKLGDLSQTLIFAKIENVEGLNHFDEILEEADGIILSRGNLGIDLPPEKVFLFQKSALHKCNMAGKPAVVTRVVDSMTDNLRPTRAEATDVANAVLDGSDAILLGAETLRGLYPVETISTVGRICAEAEKVFNQDLYFKRTVKYVGEPMTHLESIASSAVRAAIKVKASVIICFTSSGRAARLIAKYRPTMPVLSVVIPRLKTNQLKWSFTGAFEARQSLIVRGLFPMLADPRHPAESTSTTNESVLKVALDHGKASGVIKSHDRVVVCQKVGDSSVVKIIELDD

SEQ ID NO: 8497 - DNA, 1533 bp, Arabidopsis thaliana; identical to SEQ ID NO: 95
  CDS (1)..(1533)

SEQ ID NO: 8498 - protein, 510 aa, Arabidopsis thaliana; identical to SEQ ID NO: 96

SEQ ID NO: 8499 - DNA, 1548 bp, Zea mays; identical to SEQ ID NO: 8491
  CDS (1)..(1548)

SEQ ID NO: 8500 - protein, 515 aa, Zea mays; identical to SEQ ID NO: 8492

SEQ ID NO: 8501 - DNA, 1584 bp, Glycine max; identical to SEQ ID NO: 8493
  CDS (1)..(1584)

SEQ ID NO: 8502 - protein, 527 aa, Glycine max; identical to SEQ ID NO: 8494

SEQ ID NO: 8503 - DNA, 1584 bp, Hordeum vulgare; identical to SEQ ID NO: 8495
  CDS (1)..(1584)

SEQ ID NO: 8504 - protein, 527 aa, Hordeum vulgare; identical to SEQ ID NO: 8496

SEQ ID NO: 8505 - DNA, 423 bp, Arabidopsis thaliana; identical to SEQ ID NO: 1156
  CDS (1)..(423)

SEQ ID NO: 8506 - protein, 140 aa, Arabidopsis thaliana; identical to SEQ ID NO: 1157

SEQ ID NO: 8507 - DNA, 378 bp, Glycine max
  CDS (1)..(378)
atggaagccacaacagagcagaacaattcaaaggtggtgctgattgattctttgcaatcttgggagttccatgtcaaccaggcctccaatcagaatagtcctgttgttgttcacttcactgcttcatggtgcatgccatcggtggctatgactcctgtttttgaagaactggcttcaagctatccggatgttctgtttctcactgttgatgttgatgaagtcaaggaggtagccaccaaaatggatgtaaaggcaatgccaacatttttgtttctgaaggactgtgccgtggtggagaaggtggttggtgctaatccagaagagataaagaaaaggatagatgggcttgctgagtccactcgtgtctcactggcgtag

SEQ ID NO: 8508 - protein, 125 aa, Glycine max
MEATTEQNNSKVVLIDSLQSWEFHVNQASNQNSPVVVHFTASWCMPSVAMTPVFEELASSYPDVLFLTVDVDEVKEVATKMDVKAMPTFLFLKDCAVVEKVVGANPEEIKKRIDGLAESTRVSLA

SEQ ID NO: 8509 - DNA, 387 bp, Brassica napus
  CDS (1)..(387)
atgggttccaacgtttcatctgtgcatgatgttccttcatcagcggaaaccaagaatggtttggttgtggaaatggaatcaagaagacagtggagatctctctttgattccatgaaaggctcaaataaattgctagtgattgatttcactgctgcatggtgtggaccttgtaaagcaatggaacctagagttaaggagatcgtttctaggtatccagaagctgtttttgcgagggttgatgtggatagattcatggatgtggctggaacatatagagcaaatactcttccagcctttgtttttgtgaagagaggagaagagattgatagggttgttggagccaaacctgatgaacttgtgtacaagattgaaaagcatagggtttaa

SEQ ID NO: 8510 - protein, 128 aa, Brassica napus
MGSNVSSVHDVPSSAETKNGLVVEMESRRQWRSLFDSMKGSNKLLVIDFTAAWCGPCKAMEPRVKEIVSRYPEAVFARVDVDRFMDVAGTYRANTLPAFVFVKRGEEIDRVVGAKPDELVYKIEKHRV

SEQ ID NO: 8511 - DNA, 357 bp, Linum usitatissimum
  CDS (1)..(357)
atggcagcggaggaaggcctggtgtttggttgccataccgttgaagagtgggaggcccagcttcagaaggctaacgaatctaagaagctggtggttgttgatttcactgcgacatggtgtgggccttgccgtttgatggtgccattcctcgcagagcttgctaagaagctgcccacagttaccttcctcaaggtcgatgtggatgaactcaaaacagttgctgaggattgggctgttgaggcaatgccaacattcatgtttgtgaaaaatggaaagatactcgacagggtggttggtgccaagaaggaagagctgcagtatactatcaacaagtatttggctactgcctctgcttga

SEQ ID NO: 8512 - protein, 118 aa, Linum usitatissimum
MAAEEGLVFGCHTVEEWEAQLQKANESKKLVVVDFTATWCGPCRLMVPFLAELAKKLPTVTFLKVDVDELKTVAEDWAVEAMPTFMFVKNGKILDRVVGAKKEELQYTINKYLATASA

SEQ ID NO: 8513 - DNA, 420 bp, Helianthus annuus
  CDS (1)..(420)
atggggcattgcttctcttcgcctcgggctgatgaagacgagaccaacagtcatgctcagcttgcgggaggtaacgtgactctcatcactaccaagaacgcttgggatcaaaaactggcagaagcaaagactcaaggcaaaatagtgattggcaacttcagtgcaacttggtgtggtccatgcaaatcaatggcaccttactacattgagctatcagagaagtatccttctcttatgtttctgaccgtagacgttgacgaattaacggattttagcacacaactggatgtaaaagctactccaacattcttcttctttaaagatggtcaacaaattgataaacttgtgggagccaacaagcctgaactgcagaaaaagataaccgccattgttgattcacaagcaaccataaatccataa

SEQ ID NO: 8514 - protein, 139 aa, Helianthus annuus
MGHCFSSPRADEDETNSHAQLAGGNVTLITTKNAWDQKLAEAKTQGKIVIGNFSATWCGPCKSMAPYYIELSEKYPSLMFLTVDVDELTDFSTQLDVKATPTFFFFKDGQQIDKLVGANKPELQKKITAIVDSQATINP

SEQ ID NO: 8515 - DNA, 723 bp, Arabidopsis thaliana; identical to SEQ ID NO: 1510
  CDS (1)..(723)

SEQ ID NO: 8516 - protein, 240 aa, Arabidopsis thaliana; identical to SEQ ID NO: 1511

SEQ ID NO: 8517 - DNA, 729 bp, Brassica napus
  CDS (1)..(729)
atgggagacaaacatcagccataccttaacggcgcatactacggcccatcggttcctccgccgcttaagcccaatcgccgatacaaaccacccggatgctgctgctgcttcaactgcatcggaagctgtctacgttgctgcggttgctgtatcctaagcctaatctgcaacatcctcgtagccgtagccgttatcctcgccgtaacggcattacttatctggctcatcttccgtcccaacgccgtcaaattctacgtaaccgacgctagtctaaaccggttcagcttggattcaaacaacaacagcaagatacactatgatctccatctcaacttcacggtccgtaaccctaaccaacgactcggagtctactacgatgcgatccaggtcagtggttattacggagaacagcggttcggttatgtagacgtttcgccgttctatcagggacataaaaacacgacggttgttgtgacaagggtccagggacagaacttggtggtgctcggggatggagcgagagtggatctgaaggaggacgataaagctggagtttatggtattgatgtgaagctggtgatgagtgttaggtttaggttttgggtggtaaagtcatggaaattcaaaccgaagattaaatgtaatgatcttaaggttcctctcgtatcctctagttcaactagcgggtttaggtttaaaactatggagtgtgactttgacttttattag

SEQ ID NO: 8518 - protein, 242 aa, Brassica napus
MGDKHQPYLNGAYYGPSVPPPLKPNRRYKPPGCCCCFNCIGSCLRCCGCCILSLICNILVAVAVILAVTALLIWLIFRPNAVKFYVTDASLNRFSLDSNNNSKIHYDLHLNFTVRNPNQRLGVYYDAIQVSGYYGEQRFGYVDVSPFYQGHKNTTVVVTRVQGQNLVVLGDGARVDLKEDDKAGVYGIDVKLVMSVRFRFWVVKSWKFKPKIKCNDLKVPLVSSSSTSGFRFKTMECDFDFY

SEQ ID NO: 8519 - DNA, 684 bp, Glycine max
  CDS (1)..(684)
atggccgataagcaaccccacctgaacggtgcttattacggtcccgccattcccccggcggagcaaccacgctaccgccctcaccgcgaaagaagctgctgctgctgcctcttcggaatcttgtggaagattctggttgcactcattgtcctcgttggcctcgcagtactcatattctggctggtggttcaaccccgctacttcaagttctacgtcacggaagccgacctaacacaatttgattactatagcaacaacaacaccctccactacaacatggtcctcaacttcactgcacgcaaccccaacaagaagctcagcatatactacgacaaggttgaggcattagcattctacgaggatgtcaggttcgccaattacagtgtgataacgcccatgaactccttccggcagtacaagaagagcagcagcaccatgagcgctgttttatcggggcagcaagtgttgccgctcgacaacgacctagtctcagagttgaaccaagacaagattggtggggtgtacgagatctatgtgaagctctacttcaggattaggttcaggctcggggatgtcaaaacccgtcgcttcaagcccaaggtcaaatgtgatgcgaaggttcccttgaggaccatgggcaacgtaactctgtttcagaccaccaagtgtgatgtcgattactag

SEQ ID NO: 8520 - protein, 227 aa, Glycine max
MADKQPHLNGAYYGPAIPPAEQPRYRPHRERSCCCCLFGILWKILVALIVLVGLAVLIFWLVVQPRYFKFYVTEADLTQFDYYSNNNTLHYNMVLNFTARNPNKKLSIYYDKVEALAFYEDVRFANYSVITPMNSFRQYKKSSSTMSAVLSGQQVLPLDNDLVSELNQDKIGGVYEIYVKLYFRIRFRLGDVKTRRFKPKVKCDAKVPLRTMGNVTLFQTTKCDVDY

SEQ ID NO: 8521 - DNA, 684 bp, Glycine max
  CDS (1)..(684)
atggccgataagcaaccccacttgaacggtgcttattacggtcccgccattcccccggcggagcaaccacgctaccgccctcaccgcggcagaagctgctgttgctgtctcttcggaatcttgtggaagattctggttgcacttattgtcctcgttggccttgcaatcctcattttctggttggtggttcaaccccgctacttcaagttccatgtcacgaaagccgacctaacacaatttgattactatagcaacaacaacaccctccactacaacatggtcctcaacttcactgcacgcaaccccaacaagaagctcagcatatactacgacaaggttgaggcattagcattctacgaggatgtcaggttcgccaattacgatgtgatcactcacatgaactccttccggcagtacaagaagagcagcagccccatgagcgctgttttcacggggcagcaagtgctgatgctcaacaatgaacaagtctcagagttgaaccaagacaagaatgctggggtttatgacatctatgtgaagctctacttcaggattaggttcaggcttggggacgtcatatccaatgactacaagcccaaggtcaaatgtcacctcaaggtcccttttagtaaaaatggcacctttactctgtttccgaccaccaagtgtgatgtcgatttctaa

SEQ ID NO: 8522 - protein, 227 aa, Glycine max
MADKQPHLNGAYYGPAIPPAEQPRYRPHRGRSCCCCLFGILWKILVALIVLVGLAILIFWLVVQPRYFKFHVTKADLTQFDYYSNNNTLHYNMVLNFTARNPNKKLSIYYDKVEALAFYEDVRFANYDVITHMNSFRQYKKSSSPMSAVFTGQQVLMLNNEQVSELNQDKNAGVYDIYVKLYFRIRFRLGDVISNDYKPKVKCHLKVPFSKNGTFTLFPTTKCDVDF

SEQ ID NO: 8523 - DNA, 666 bp, Glycine max
  CDS (1)..(666)
atgccccagttgaacggagcctactacggcccctccatcccgccgccgaaaacttcctaccaccgtcctgggcgcggcggaggcctcggctgctgctgcgggtgcctcttcagcctcatcttcaagctcatcctaaccgtgatcatcatcattggcatcgccgtgttccttttctggctcatagtccgtcccaacgtggtgaaattccacgtcaccgaggccaccctgacgcagttcaactacacccccaacaacacgctccactacgacctcgccctcaacatcacggtccgaaaccccaacaagaggctcggaatctactacgaccgcatcgaggcgcgtgcaatgttccacgacgcgaggtttgattcccagttcccggaaccattctaccagggccacaagagcaccaacgtgctgaacccggtgtttaagggtcagcaattggtgccactcaacgctgaccaatccgcggaactgaagaaggagaacgccactggggtgtacgagatcgatgtgaagatgtaccttagggtcaggttcaagttgggtgtcttcaagaccaagacgcttaagcccaaagtatcatgcgacttacgtgttcctttgaaaggaagcgccggtgctggtgtctttcagaccaccaagtgcgactgggatcgctga

SEQ ID NO: 8524 - protein, 221 aa, Glycine max
MPQLNGAYYGPSIPPPKTSYHRPGRGGGLGCCCGCLFSLIFKLILTVIIIIGIAVFLFWLIVRPNVVKFHVTEATLTQFNYTPNNTLHYDLALNITVRNPNKRLGIYYDRIEARAMFHDARFDSQFPEPFYQGHKSTNVLNPVFKGQQLVPLNADQSAELKKENATGVYEIDVKMYLRVRFKLGVFKTKTLKPKVSCDLRVPLKGSAGAGVFQTTKCDWDR

SEQ ID NO: 8525 - DNA, 1173 bp, Arabidopsis thaliana; identical to SEQ ID NO: 1598
  CDS (1)..(1173)

SEQ ID NO: 8526 - protein, 390 aa, Arabidopsis thaliana; identical to SEQ ID NO: 1599

SEQ ID NO: 8527 - DNA, 1164 bp, Brassica napus
  CDS (1)..(1164)
atgtcagatgggtactatagttgtaaaaagacggacgatatctgcgaagatgtttgtggtcaggatggttcacgagcagcgaaggccttctcaagagtcagatgcgtactacgcggactcgatttcaagacatacatcatcttcctcaccatcatccccatcttcatcctcggagtctacttgcacggccaaaagctcacttacttcctgagacccctctgggaatcaccgcccaagccgtttcaaaccctcccgcattactaccaccacaacgcctccatggagacactctgcagcctccacgggtggacacaccgcgagtctccgcggcgcgtcttcgacgccgtcctgttcagcaacgaggtcgacatgctcaccatccgctggaaagagctttacccttacgtgacgcagttcgtggtcctcgaatctaactcgacgttcaccggtttgcctaaaccgctggttttcgccgcgaaccgagataagttcgggtttgtggagccgaggctgacgtatgggaacataggaaggagtttcaagagaggggagaaccctttcgttgaagaagcttaccagaggattgcgttagatcagttaataggactcgcggggattcaagaagatgatctgttgataatgtctgacgtggacgagatccccagcgctcacaccatcaacctccttagatggtgcgatggataccctcccgttctccatctccagctcaagaactacctctactcgttcgagtattacctcgataacaagagctggagagcttctgttcatcggtacaagcccgggaagacgcggtacgctcatttccgacgaggggacactcttttggcggatgctggttggcattgcagtttctgtttcaggcgtataagcgagtttgtgttcaagatgaaagcgtatagtcacaacgatagggtgagattctctcattatctgaatccgaagaggatacaggatgtggtatgtagagggactgatctgtttgacatgcttcctgaagagcatacgttcagggagatcattgggaagctggggccgatccctaggtcttactcggctgttcatctcccggggcatttgattgagaatgctgagagttataagtacttgttgcctgggaactgcgttagggacagtggctga

SEQ ID NO: 8528 - protein, 387 aa, Brassica napus
MSDGYYSCKKTDDICEDVCGQDGSRAAKAFSRVRCVLRGLDFKTYIIFLTIIPIFILGVYLHGQKLTYFLRPLWESPPKPFQTLPHYYHHNASMETLCSLHGWTHRESPRRVFDAVLFSNEVDMLTIRWKELYPYVTQFVVLESNSTFTGLPKPLVFAANRDKFGFVEPRLTYGNIGRSFKRGENPFVEEAYQRIALDQLIGLAGIQEDDLLIMSDVDEIPSAHTINLLRWCDGYPPVLHLQLKNYLYSFEYYLDNKSWRASVHRYKPGKTRYAHFRRGDTLLADAGWHCSFCFRRISEFVFKMKAYSHNDRVRFSHYLNPKRIQDVVCRGTDLFDMLPEEHTFREIIGKLGPIPRSYSAVHLPGHLIENAESYKYLLPGNCVRDSG

SEQ ID NO: 8529 - DNA, 1173 bp, Triticum aestivum
  CDS (1)..(1173)
atggagtctgccggctactacaccaactgcaagaagaccgacggaatctgcgagggcatctgcgacggcgagcatggttcaaaggctgttctgagcatgtcaaggctgaagtgtgcacttcggggatttgatttaaaggcccttctgttcctgctgattggtgtgccgattataattttcgtcatatatgttcatggccagaaggtcacttatttcctcagaccaatctgggagaagcccccgaagcctttcactgtacttcctcactactatcatgaaaatgtttcgatggcaaacctctgcaagttgcatggatggaaggtccgagaggctccacggcgtgtctttgacgcggtgcttttcagcaacgagcttgacattcttgatattcgttggcacgagcttagcccgtatgtgtcagaatttgtgctgctcgagtccaattcaacatttactggccttgaaaagaagctccacttcaaggaaaaccgccaaaagtttgagtttgctgaatcacggttgacctatggtatgataggggggaggtttgtgaagggtgagaacccatttgtggaggaatcatatcagagagtcgcgcttgaccagcttctaaagatcgccgggatcaccgacgatgacctgttgattatgtctgatgttgatgagatcccaagtggtcatacaatcaacctgttgagatggtgcgatgatacgcctgagatacttcaccttcagctgaagaactatctctactcgtttcaatttatgcttgatgataagagttggagggcttcagtacacagataccgagcggggaagacgaggtatgcccattaccggcaaactgacgaccttctggcagactcaggatggcactgcagcttttgctttcggtacataaatgattttgtcttcaaaatgaaagcctacagccatgtggaccggatcagattcagctacttcctgaaccccaaaagaattcagcatgtgatatgccaaggggctgatctctttgatatgcttccggaggagtacacgttccaagagatcatcgccaagcttggtccaatcccaagtacgtattcagcggttcatcttcccgcctatctgctcgagaaggttgatcagtacaggtatcttcttcctggcaactgcatgagagaaagtgggtag

SEQ ID NO: 8530 - protein, 390 aa, Triticum aestivum
MESAGYYTNCKKTDGICEGICDGEHGSKAVLSMSRLKCALRGFDLKALLFLLIGVPIIIFVIYVHGQKVTYFLRPIWEKPPKPFTVLPHYYHENVSMANLCKLHGWKVREAPRRVFDAVLFSNELDILDIRWHELSPYVSEFVLLESNSTFTGLEKKLHFKENRQKFEFAESRLTYGMIGGRFVKGENPFVEESYQRVALDQLLKIAGITDDDLLIMSDVDEIPSGHTINLLRWCDDTPEILHLQLKNYLYSFQFMLDDKSWRASVHRYRAGKTRYAHYRQTDDLLADSGWHCSFCFRYINDFVFKMKAYSHVDRIRFSYFLNPKRIQHVICQGADLFDMLPEEYTFQEIIAKLGPIPSTYSAVHLPAYLLEKVDQYRYLLPGNCMRESG

SEQ ID NO: 8531 - DNA, 1086 bp, Helianthus annuus
  CDS (1)..(1086)
atgggctcaccgcggtctgtcgctagacgaagaatcaccaagtgcacgtttcttctactacttgttattctcgtgacacttccgttcacagccatctttgatcacacccaaaacatcacttcattcctacgcccactttgggacacaccaccacccccattcgaatacatcccgcactactacgcagaaaacaccacaatcagcaacctctgcacgctccacggctggtccttaacctctgaaccgcgcaatgtctatgacgcaatcctattcaacaacgaactagacctgctcgagctccgctggcgcgaactatacccatacgtcaccaaattcatcatcctcgaatccaacatgaccttcaccggcatgcccaaaccccttgtcttcgattcgaatcgcgcccgtttcgctttcgcagaagacaaaatcgtatacgggttgctcccgatcccactatcacccgatgtgcccgtggaccctttcttaatcgagtcacatcaccgtagcattatgaacgagctgatccgacggtcagggatctccgatggcgatcttttactcgtgtccgacaccgatgaaatcccgagctctcacacggttaagttgctaaaatggtgtgatgggctgccaactgttttacatcttgaaatgagaaactatgtttactcatttgaattcccagtggactacaacagctggcgggccaccgcgcatatatacagccggtggactcgatacaggcattcccgacaaaccgatctcattctttcggatgctgggtggcactgcagcttctgttttcggcacctgagcgagtttgtgacgaaaatgacggcgtacagtcacgctgatcgcgtgaagaaaagggagtatttagattactctaggattcagaggaagatttgtaggggagatgacctttatgatatgttgcctgaagagtatagttttaagagtttgataggaaagatggggtcggtaccgcggtcggcttcggcagttcatttgccggcctatttgatagagaatgcagagaagtttaagtttcttcttcccggtggctgtcagcgttcgccggagtga

SEQ ID NO: 8532 - protein, 361 aa, Helianthus annuus
MGSPRSVARRRITKCTFLLLLVILVTLPFTAIFDHTQNITSFLRPLWDTPPPPFEYIPHYYAENTTISNLCTLHGWSLTSEPRNVYDAILFNNELDLLELRWRELYPYVTKFIILESNMTFTGMPKPLVFDSNRARFAFAEDKIVYGLLPIPLSPDVPVDPFLIESHHRSIMNELIRRSGISDGDLLLVSDTDEIPSSHTVKLLKWCDGLPTVLHLEMRNYVYSFEFPVDYNSWRATAHIYSRWTRYRHSRQTDLILSDAGWHCSFCFRHLSEFVTKMTAYSHADRVKKREYLDYSRIQRKICRGDDLYDMLPEEYSFKSLIGKMGSVPRSASAVHLPAYLIENAEKFKFLLPGGCQRSPE

SEQ ID NO: 8533 - DNA, 1671 bp, Arabidopsis thaliana; identical to SEQ ID NO: 1936
  CDS (1)..(1671)

SEQ ID NO: 8534 - protein, 556 aa, Arabidopsis thaliana; identical to SEQ ID NO: 1937

SEQ ID NO: 8535 - DNA, 1593 bp, Brassica napus
  CDS (1)..(1593)
atgggaaactgttgtgcaacccctggttccgacaccaagtccaaagacgccaaaccaaagaccaaaaacaaccctttttacagcgaagcctacactacaacaaccggcttcaagctctccgttttaaaagatccaacaggacatgacataaccctcatgtacgatcttggccgcgaggttggtcgtggagagttcggtatcacctacctctgcactgatatcaacaccggcgagaagtatgcgtgcaagtctatatccaagaagaagcttagaacggctgtggatatagaggatgttaggagagaggttgagataatgaagcatatgcctaagcatcctaatatagtctcgcttaaggatgcctttgaggatgatgacgcggtgcatatagtgatggagttgtgtgaaggtggtgagctgtttgatcggattgttgcgagaggtcattatactgaacgtgctgctgctgctgttatgaagactattcttgaagttgttcaggtatgtcataagaatggagtgatgcatagggatcttaagccggagaactttctatttgctaataaaaaagagacgtcgccacttaaagctattgattttggattgtcagtcttctttagacctggtgaggggtttaatgaaattgttgggagtccttattacatggcaccagaagtgcttaggcgaaactatggacctgaggttgatatctggagtgctggagtcatcctttatattctcctctgtggtgtccctcccttttgggcagagactgagcaaggggtggctcaggcgatcattaggtcagtcattgacttcaagagggatccatggccaagagtctctgacactgccaaagaccttgtgagaaagatgctcgaacctgaccccaaaaaacgcctttctgctgcagaagtactcgaacatccttggatacaaaatgcaaagaaggctccaaatgtttccctcggggagactgtgaaagcaaggctcaaacagttttctgttatgaataagctcaagaaacgagctctacgggtgatagccgaacatttatcagtagaggaagtagctggaataaaggaagcgtttgagatgatggacagtaacaaaacggggaagataaacctcgagcagcttaaacatggacttcataaactcggacagcagcagatggctgatgctgatctacagattttgatggaagctgctgatgtagatggggacgggactttaaattatggagagtttgtggctgtctctgtgcatcttaagaagatggcgaacgacgagcatttgcacaaggcttttagctttttcgaccagaaccagagcgattacatagagattgaggagctgcggcaggctttaaatgatgaggaggatactagcagtgaggaagttattgcagccatcatgcaagatgttgacaccgacaaggatggacgaataagctatgaagagtttgcagcgatgatgaaagctgggacagactggaggaaagcatcgagacagtattccagggaaagattcaacagtttgagtctcaagttgatgagagacggttcattgcagttagaaggcgagaactga

SEQ ID NO: 8536 - protein, 530 aa, Brassica napus
MGNCCATPGSDTKSKDAKPKTKNNPFYSEAYTTTTGFKLSVLKDPTGHDITLMYDLGREVGRGEFGITYLCTDINTGEKYACKSISKKKLRTAVDIEDVRREVEIMKHMPKHPNIVSLKDAFEDDDAVHIVMELCEGGELFDRIVARGHYTERAAAAVMKTILEVVQVCHKNGVMHRDLKPENFLFANKKETSPLKAIDFGLSVFFRPGEGFNEIVGSPYYMAPEVLRRNYGPEVDIWSAGVILYILLCGVPPFWAETEQGVAQAIIRSVIDFKRDPWPRVSDTAKDLVRKMLEPDPKKRLSAAEVLEHPWIQNAKKAPNVSLGETVKARLKQFSVMNKLKKRALRVIAEHLSVEEVAGIKEAFEMMDSNKTGKINLEQLKHGLHKLGQQQMADADLQILMEAADVDGDGTLNYGEFVAVSVHLKKMANDEHLHKAFSFFDQNQSDYIEIEELRQALNDEEDTSSEEVIAAIMQDVDTDKDGRISYEEFAAMMKAGTDWRKASRQYSRERFNSLSLKLMRDGSLQLEGEN

SEQ ID NO: 8537 - DNA, 387 bp, Arabidopsis thaliana; identical to SEQ ID NO: 2492
  CDS (1)..(387)

SEQ ID NO: 8538 - protein, 128 aa, Arabidopsis thaliana; identical to SEQ ID NO: 2493

SEQ ID NO: 8539 - DNA, 453 bp, Brassica napus
  CDS (1)..(453)
atgaagagattgttcctgtgttcgtctctgcatcagatggaagataacaattctcccaaggattactataagattctggaagttgattatgatgcaactgaggagatgctcaaactgagttatcggaagcttgctttgaagtggcatcctgataagcacaatggtgatactatggctacttcaaagtttcaggagatcaatgaagcttataacgtgctaatggatcctgatttacgttttgagtatgatttaaccggaatatacgagattcacaagtatactttgcgggagtatctggctaggtttaagggaatgatactcacttgcaatggactaggcatcagtcactcctcatcaccatggacacaacaattggcggaaggcaatatcactacagatgagcaaggcttctgtactgaaactgaaactgaaactgaaacagagcttaagtaa

SEQ ID NO: 8540 - protein, 150 aa, Brassica napus
MKRLFLCSSLHQMEDNNSPKDYYKILEVDYDATEEMLKLSYRKLALKWHPDKHNGDTMATSKFQEINEAYNVLMDPDLRFEYDLTGIYEIHKYTLREYLARFKGMILTCNGLGISHSSSPWTQQLAEGNITTDEQGFCTETETETETELK

SEQ ID NO: 8541 - DNA, 909 bp, Synechocystis sp.; identical to SEQ ID NO: 6041
  CDS (1)..(909): transl_table=11

SEQ ID NO: 8542 - protein, 302 aa, Synechocystis sp.; identical to SEQ ID NO: 6042

SEQ ID NO: 8543 - DNA, 1005 bp, Helianthus annuus
  CDS (1)..(1005)
atggtgctgtttgcaacagctgtaacttcaagtccctatttacattttccgaagagactatcagttactcgacaaagtatcagatgttctttgactacatcatcagtttctgcaaactttgaccttaaaacttactggtcaactctgagagaagaaattaaccagaaacttgatgaagctatacctgttaagtacccagctcagatatatgaatccatgcgctattctgttcttgcagaaggagccaaaagagcaccacctgttatgtgtgttgccgcctgtgagctccttggtggtaaccgccttgctgccttccccaccgcttgtgcccttgagatggtgcatgctgcctctttaatccatgacgacttgccatgcatggatgatgacccatcccgaaggggtcaaccatccaaccacaccgtcttcgggatggacatggccatcttagctggcgacgcattgttcccgctagggttccgccacattgtctctcacaccccaactaatctcgtcccagaaacccaactccttcgtgtcataaacgaaatcgcacgagccgttggttccaccggcatggctgctggtcagtttgtggacctggagggcccagcaaacgccatagacttcatccatgaaaagaagtacggtgagatgggtgaatgctctgcggtttgtggaggacttctagctggtgctaacgatgatgagatccaacggctcagacgatacgggagagcagtcgggatcttgtatcaagtggttgacgatttgttggaagcgaaatcatctaaaaccaaattagtagatgcagaagaaaagaaggaaaagagttatgtgggtgcttacggcgttgagaaggcgatgaaagtagcggaggatcttagagccgaagctaaaaacgctttggaagggttcgaaaagtatggcgagaaggtgttgccgttatacagtttcgtcgattatgccgctgatagaagttttagcttttctgatcaggtttga

SEQ ID NO: 8544 - protein, 334 aa, Helianthus annuus
MVLFATAVTSSPYLHFPKRLSVTRQSIRCSLTTSSVSANFDLKTYWSTLREEINQKLDEAIPVKYPAQIYESMRYSVLAEGAKRAPPVMCVAACELLGGNRLAAFPTACALEMVHAASLIHDDLPCMDDDPSRRGQPSNHTVFGMDMAILAGDALFPLGFRHIVSHTPTNLVPETQLLRVINEIARAVGSTGMAAGQFVDLEGPANAIDFIHEKKYGEMGECSAVCGGLLAGANDDEIQRLRRYGRAVGILYQVVDDLLEAKSSKTKLVDAEEKKEKSYVGAYGVEKAMKVAEDLRAEAKNALEGFEKYGEKVLPLYSFVDYAADRSFSFSDQV

SEQ ID NO: 8545 - DNA, 312 bp, Saccharomyces cerevisiae; identical to SEQ ID NO: 1334
  CDS (1)..(312)

SEQ ID NO: 8546 - protein, 103 aa, Saccharomyces cerevisiae; identical to SEQ ID NO: 1335

SEQ ID NO: 8547 - DNA, 414 bp, Oryza sativa; identical to SEQ ID NO: 1162
  CDS (1)..(414)

SEQ ID NO: 8548 - protein, 137 aa, Oryza sativa; identical to SEQ ID NO: 1163

SEQ ID NO: 8549 - DNA, 423 bp, Brassica napus; identical to SEQ ID NO: 1380
  CDS (1)..(423)

SEQ ID NO: 8550 - protein, 140 aa, Brassica napus; identical to SEQ ID NO: 1381

SEQ ID NO: 8551 - DNA, 402 bp, Brassica napus; identical to SEQ ID NO: 1386
  CDS (1)..(402)

SEQ ID NO: 8552 - protein, 133 aa, Brassica napus; identical to SEQ ID NO: 1387

SEQ ID NO: 8553 - DNA, 378 bp, Glycine max; identical to SEQ ID NO: 8507
  CDS (1)..(378)

SEQ ID NO: 8554 - protein, 125 aa, Glycine max; identical to SEQ ID NO: 8508

SEQ ID NO: 8555 - DNA, 387 bp, Brassica napus; identical to SEQ ID NO: 8509
  CDS (1)..(387)

SEQ ID NO: 8556 - protein, 128 aa, Brassica napus; identical to SEQ ID NO: 8510

SEQ ID NO: 8557 - DNA, 360 bp, Triticum aestivum; identical to SEQ ID NO: 1388
  CDS (1)..(360)

SEQ ID NO: 8558 - protein, 119 aa, Triticum aestivum; identical to SEQ ID NO: 1389

SEQ ID NO: 8559 - DNA, 357 bp, Linum usitatissimum; identical to SEQ ID NO: 8511
  CDS (1)..(357)

SEQ ID NO: 8560 - protein, 118 aa, Linum usitatissimum; identical to SEQ ID NO: 8512

SEQ ID NO: 8561 - DNA, 420 bp, Helianthus annuus; identical to SEQ ID NO: 8513
  CDS (1)..(420)

SEQ ID NO: 8562 - protein, 139 aa, Helianthus annuus; identical to SEQ ID NO: 8514

SEQ ID NO: 8563 - DNA, 303 bp, SACCHAROMYCES CEREVISIAE; identical to SEQ ID NO: 8239
  CDS (1)..(303)

SEQ ID NO: 8564 - protein, 100 aa, SACCHAROMYCES CEREVISIAE; identical to SEQ ID NO: 8240

SEQ ID NO: 8565 - DNA, 333 bp, Oryza sativa; identical to SEQ ID NO: 8355
  CDS (1)..(333)

SEQ ID NO: 8566 - protein, 110 aa, Oryza sativa; identical to SEQ ID NO: 8356

SEQ ID NO: 8567 - DNA, 342 bp, Oryza sativa; identical to SEQ ID NO: 8357
  CDS (1)..(342)

SEQ ID NO: 8568 - protein, 113 aa, Oryza sativa; identical to SEQ ID NO: 8358

SEQ ID NO: 8569 - DNA, 339 bp, Brassica napus; identical to SEQ ID NO: 8379
  CDS (1)..(339)

SEQ ID NO: 8570 - protein, 112 aa, Brassica napus; identical to SEQ ID NO: 8380

SEQ ID NO: 8571 - DNA, 348 bp, Brassica napus; identical to SEQ ID NO: 8361
  CDS (1)..(348)

SEQ ID NO: 8572 - protein, 115 aa, Brassica napus; identical to SEQ ID NO: 8362

SEQ ID NO: 8573 - DNA, 339 bp, Brassica napus; identical to SEQ ID NO: 8363
  CDS (1)..(339)

SEQ ID NO: 8574 - protein, 112 aa, Brassica napus; identical to SEQ ID NO: 8364

SEQ ID NO: 8575 - DNA, 339 bp, Brassica napus; identical to SEQ ID NO: 8365
  CDS (1)..(339)

SEQ ID NO: 8576 - protein, 112 aa, Brassica napus; identical to SEQ ID NO: 8366

SEQ ID NO: 8577 - DNA, 336 bp, Triticum aestivum
  CDS (1)..(336)
atggctccgtcgcagcccaagtcgggcctcttcgtgggcatcaacaagggccacgtcgtcaccaagcgcgagctgccgccacgcccgtccgaccgcaaggggaaaggtaccaagagggtgcatttcgtcaggaacttgatcagggaggtcgctgggtttgctccgtatgagaagcgtatcactgagcttctcaaggttggcaaggacaagcgtgccctgaaggtggcgaagcgaaagttgggtacccacaagagggcgaagaagaagagagaggagatgtccagtgtcctcaggaagatgagatctgctggaactggaaccgagaagaagaaatag

SEQ ID NO: 8578 - protein, 111 aa, Triticum aestivum; identical to SEQ ID NO: 8262

SEQ ID NO: 8579 - DNA, 333 bp, Glycine max
  CDS (1)..(333)
atggctcccaaaccgcctagtacgggtctgtttgttggactgaacaagggtcacgtcgtcaccaagaaggaattgcccccacgcccctcagatcgtaaggggaaaacaagcaagagggtgcactttgtgaggaacctcataagagaggttgctggttttgcaccctatgaaaagcgtataactgagttgctgaaggttgggaaggataagagggcactgaaggttgcaaagagaaagcttggaacccacaaacgtgcaaagaagaagcgtgaggaaatgtccagtgttctcaggaagatgagggctggtggtgctggagacaagaagaaataa

SEQ ID NO: 8580 - protein, 110 aa, Glycine max; identical to SEQ ID NO: 8244

SEQ ID NO: 8581 - DNA, 333 bp, Linum usitatissimum; identical to SEQ ID NO: 8367
  CDS (1)..(333)

SEQ ID NO: 8582 - protein, 110 aa, Linum usitatissimum; identical to SEQ ID NO: 8368

SEQ ID NO: 8583 - DNA, 336 bp, Zea mays; identical to SEQ ID NO: 8369
  CDS (1)..(336)

SEQ ID NO: 8584 - protein, 111 aa, Zea mays; identical to SEQ ID NO: 8370

SEQ ID NO: 8585 - DNA, 342 bp, Hordeum vulgare; identical to SEQ ID NO: 8371
  CDS (1)..(342)

SEQ ID NO: 8586 - protein, 113 aa, Hordeum vulgare; identical to SEQ ID NO: 8372

SEQ ID NO: 8587 - DNA, 333 bp, Helianthus annuus; identical to SEQ ID NO: 8373
  CDS (1)..(333)

SEQ ID NO: 8588 - protein, 110 aa, Helianthus annuus; identical to SEQ ID NO: 8374

SEQ ID NO: 8589 - DNA, 2797 bp, Oryza sativa
tttgtacaaaaaagcaggcttaaacaatgaagctctcgccgtcggccggcggcgtctccgaccagccgccgtcgccgccggaagttgcagaggagcagaagtgcctaaattctgagttgtggcatgcatgcgccggccctctcgtttcgctgcctgcggtcggtagtcgggtggtttattttcctcaaggccacagtgagcaggtagctgcatcaacaaataaggaaatggagtctcagatccccaactatcctaacctgccgccgcagcttatatgccagctacataatgtgaccatgcacgccgatgcagagacggatgaagtctatgcgcaaatgacgctgcagccactcagcccgcaagagctcaaggatccattcctacccgccgagctaggcaccgccagcaagcagccaacaaattatttctgcaaaacgttaactgctagtgacacaagtacacatggtggattctctgttccccgtcgagcagcagagaaagtatttcctccgctggatttcactcagcagcctccagctcaagagttgatggcgaaagacctccatggaaatgaatggaaattccgtcatatctttcgtggccaaccgaagcggcatcttctgactacgggttggagcgtctttgtaagtgcaaagagactggttgctggagactctgtcctttttatctggaatgacagtaatcagctgcttctgggaattcgtcgggcaaataggccacaaacggtcatgccatcatcagtattgtctagtgacagcatgcatattggtctgcttgctgcagctgctcacgccgcatcaacaaatagccggtttactattttctataatccaagagcaagcccttcggagtttgttataccactggctaaatatgtaaaggctgtctaccatacccgcatatcggtgggcatgcgtttccggatgctttttgaaacagaagaatccagtgttaggagatacatggggacaataacaggaataagtgatcttgatcctgttcgttggatgaactcacactggcgctctgtcaaggttggatgggatgagtcgactgctggagagagacagccaagggtgtctctttgggagatcgagcctctgacaactttcccgatgtatccatctccttttcctctcagactaaagcgtccatggccaacaggcttaccttctttatatggcggaaaggaggatgacttggcttcttctcttatgtggcttcgagatagtcaaaacacaggtttccaatctctgaattttggaggacttggtatgagtccgtggatgcagccaaggctggatagttccctacttggtctgcaacctgacatgtaccaaacgatagcggcggcggcggctttacagaacaccactaagcaagtatcacctgccatgctgcagttccagcagccgcaaaacattgtcggtagatcttctcttctatccagtcagattctgcagcaagcacagcctcaatttcagcagatgtaccaccaaaacatcaatggcaactcaatccaaggccatagtcagcctgagtacctccagcaaccgcttcaacattgccaatcatttaacgaacagaagcctcagttgcagccgcagcaacagcagcaagaatcacaccagcagcaacctcagcatcaacaaatgcaacaacagaaacacttgtccaactttcagactgtaccaaatgcattgtcggttttttcacagctttcctccacccctcagtctacaccctccacattgcagacagtttcaccattctcacagcaacataatttccctgacacaaatatcagttgtctctctccatccaatgtctcatccatgcacgatacactgagatcattcccttcagaagctgcttcagacctcccaggtgtgccaagaatcacccctgtacctgtctctgacccatggtcatctaagcgagttgcagtggaatctacgatcacttctcgcccacatgacatttcatcacagatagagaacttcgacttgacaccttctagtattcctcaaaactccacgttagcaccactgcctggaagggaatgcctggtggatcaagatgggagctctgatcctcaaaatcacttcttgtttggtgtaaatatagactcacagtcacttttgatgcaagatggcattccaagccttcacaatgaaaacagttcaagcacaattccatattccacatccaacttccttagcccttctcaagatgattatccattgagtcaaacactaactactccgggctgcttagatgaatcaggatatgttccatgttcagataatgctgatcaagtgaggcgaccgcatgcaacctttgtgaaggtttacaaatctggaaccgttggaaggttgctcgacatcactagatttagcagttatcatgaacttcgtagtgaggtagggcgcctttttggccttgagggccagttggaagaccctttgagatcaggctggcagcttgtatttgttgaccgagaggacgacgttcttctagttggcgatgatccgtggcaggaatttgtgaacagtgtgtcttgcataaagatactttcgccgcaggaggttcagcagatgggcaagccgggcattgaactcttctcgacttctgcaaggagacttggcaacagctgtgacaactacatgagcaggcaggaatcaagaagcctaagcactggaatcgcgtcggtgggctcaattgagttctgagaaataggagctcatagcaacccagctttcttgtacaaagttgg

SEQ ID NO: 8590 - protein, 908 aa, Oryza sativa
MKLSPSAGGVSDQPPSPPEVAEEQKCLNSELWHACAGPLVSLPAVGSRVVYFPQGHSEQVAASTNKEMESQIPNYPNLPPQLICQLHNVTMHADAETDEVYAQMTLQPLSPQELKDPFLPAELGTASKQPTNYFCKTLTASDTSTHGGFSVPRRAAEKVFPPLDFTQQPPAQELMAKDLHGNEWKFRHIFRGQPKRHLLTTGWSVFVSAKRLVAGDSVLFIWNDSNQLLLGIRRANRPQTVMPSSVLSSDSMHIGLLAAAAHAASTNSRFTIFYNPRASPSEFVIPLAKYVKAVYHTRISVGMRFRMLFETEESSVRRYMGTITGISDLDPVRWMNSHWRSVKVGWDESTAGERQPRVSLWEIEPLTTFPMYPSPFPLRLKRPWPTGLPSLYGGKEDDLASSLMWLRDSQNTGFQSLNFGGLGMSPWMQPRLDSSLLGLQPDMYQTIAAAAALQNTTKQVSPAMLQFQQPQNIVGRSSLLSSQILQQAQPQFQQMYHQNINGNSIQGHSQPEYLQQPLQHCQSFNEQKPQLQPQQQQQESHQQQPQHQQMQQQKHLSNFQTVPNALSVFSQLSSTPQSTPSTLQTVSPFSQQHNFPDTNISCLSPSNVSSMHDTLRSFPSEAASDLPGVPRITPVPVSDPWSSKRVAVESTITSRPHDISSQIENFDLTPSSIPQNSTLAPLPGRECLVDQDGSSDPQNHFLFGVNIDSQSLLMQDGIPSLHNENSSSTIPYSTSNFLSPSQDDYPLSQTLTTPGCLDESGYVPCSDNADQVRRPHATFVKVYKSGTVGRLLDITRFSSYHELRSEVGRLFGLEGQLEDPLRSGWQLVFVDREDDVLLVGDDPWQEFVNSVSCIKILSPQEVQQMGKPGIELFSTSARRLGNSCDNYMSRQESRSLSTGIASVGSIEF
